(19) United States
(12) Patent Application Publication
(10) Pub. No.: US 2011/0041210 A1
(43) Pub. Date: Feb. 17, 2011

(54) Plants Having Enhanced Yield-Related Traits and a Method for Making the Same

(75) Inventors: Yves Hatzfeld, Lille (FR); Valerie Frankard, Waterloo (BE); Ana Isabel Sanz Molinero, Gentbrugge (BE); Christophe Reuzeau, Tocan Saint Apre (FR)

Correspondence Address: CONNOLLY BOVE LODGE & HUTZ, LLP, P O BOX 2207, WILMINGTON, DE, 19899, US

(73) Assignee: BASF PLANT SCIENCE GmbH

(21) Appl. No.: 12/988,190

(22) PCT Filed: Apr. 16, 2009
(86) PCT No.: PCT/EP09/54484

§ 371 Date: Oct. 15, 2010

Related U.S. Application Data
(60) Provisional application No. 61/084,402, filed on Jul. 29, 2008.
(60) Provisional application No. 61/059,298, filed on Jun. 6, 2008.
(60) Provisional application No. 61/058,237, filed on Jun. 3, 2008.
(60) Provisional application No. 61/045,695, filed on Apr. 17, 2008.
(60) Provisional application No. 61/151,520, filed on Feb. 11, 2009.

(30) Foreign Application Priority Data
Apr. 16, 2008 (EP) 08154654.1
Jun. 6, 2008 (EP) 08157765.2
Jul. 29, 2008 (EP) 08161345.7
Jan. 28, 2009 (EP) 09151551.0
May 4, 2009 (EP) 08157456.8

(51) Int. Cl. A01H 1/00; A01H 5/00; C12N 5/10; C12N 15/63

(52) U.S. Cl. 800/278; 800/295; 435/419; 435/320.1; 800/298; 800/320; 800/320.1; 800/320.2; 800/320.3

(57) ABSTRACT

The present invention relates generally to the field of molecular biology and concerns a method for enhancing various yield-related traits by modulating expression in a plant of a nucleic acid encoding an Ornithine Decarboxylase (ODC) polypeptide. The present invention also concerns plants having modulated expression of a nucleic acid encoding an ODC polypeptide, which plants have enhanced yield-related traits relative to corresponding wild type plants or other control plants. The invention also provides constructs useful in the methods of the invention. In another embodiment, the present invention relates generally to the field of molecular biology and concerns a method for increasing various plant yield-related traits, by increasing expression in a plant of a nucleic acid sequence encoding a benzothiadiazole-induced homeodomain λ_(BIHD1) polypeptide. The present invention also concerns plants having increased expression of a nucleic acid sequence encoding a BIHD1 polypeptide, which plants have increased yield-related traits relative to control plants. The invention also provides constructs useful in the methods of the invention. In yet another embodiment, the present invention relates generally to the field of molecular biology and concerns a method for enhancing various yield-related traits by modulating expression in a plant of a nucleic acid encoding a MYB30. The present invention also concerns plants having modulated expression of a nucleic acid encoding a MYB30 polypeptide, which plants have enhanced yield-related traits relative to corresponding wild type plants or other control plants. The invention also provides constructs useful in the methods of the invention. In yet another embodiment, the present invention relates generally to the field of molecular biology and concerns a method for improving various plant growth characteristics by modulating expression in a plant of a nucleic acid encoding a THOM (tomato homeobox) protein. The present invention also concerns plants having modulated expression of a nucleic acid encoding a THOM polypeptide, which plants have improved growth characteristics relative to corresponding wild type plants or other control plants. The invention also provides constructs useful in the methods of the invention. In a further embodiment, the present invention relates generally to the field of molecular biology and concerns a method for increasing various plant yield-related traits, by increasing expression in a plant of a nucleic acid sequence encoding a benzothiadiazole-induced Jiomeodomain 2 (BIHD2) polypeptide. The present invention also concerns plants having increased expression of a nucleic acid sequence encoding a BIHD2 polypeptide, which plants have increased yield-related traits relative to control plants. The invention also provides constructs useful in the methods of the invention.

[0001] The present invention relates generally to the field of molecular biology and concerns a method for enhancing various yield-related traits by modulating expression in a plant of a nucleic acid encoding an Ornithine Decarboxylase (ODC) polypeptide. The present invention also concerns plants having modulated expression of a nucleic acid encoding an ODC polypeptide, which plants have enhanced yield-related traits relative to corresponding wild type plants or other control plants. The invention also provides constructs useful in the methods of the invention.

[0002] In another embodiment, the present invention relates generally to the field of molecular biology and concerns a method for increasing various plant yield-related traits, by increasing expression in a plant of a nucleic acid sequence encoding a benzothiadiazole-induced homeodomain 1 (BIHD1) polypeptide. The present invention also concerns plants having increased expression of a nucleic acid sequence encoding a BIHD1 polypeptide, which plants have increased yield-related traits relative to control plants. The invention also provides constructs useful in the methods of the invention.

[0003] In yet another embodiment, the present invention relates generally to the field of molecular biology and concerns a method for enhancing various yield-related traits by modulating expression in a plant of a nucleic acid encoding a MYB30. The present invention also concerns plants having modulated expression of a nucleic acid encoding a MYB30 polypeptide, which plants have enhanced yield-related traits relative to corresponding wild type plants or other control plants. The invention also provides constructs useful in the methods of the invention.

[0004] In yet another embodiment, the present invention relates generally to the field of molecular biology and concerns a method for improving various plant growth characteristics by modulating expression in a plant of a nucleic acid encoding a THOM (tomato homeobox) protein. The present invention also concerns plants having modulated expression of a nucleic acid encoding a THOM polypeptide, which plants have improved growth characteristics relative to corresponding wild type plants or other control plants. The invention also provides constructs useful in the methods of the invention.

[0005] In a further embodiment, the present invention relates generally to the field of molecular biology and concerns a method for increasing various plant yield-related traits, by increasing expression in a plant of a nucleic acid sequence encoding a benzothiadiazole-induced homeodomain 2 (BIHD2) polypeptide. The present invention also concerns plants having increased expression of a nucleic acid sequence encoding a BIHD2 polypeptide, which plants have increased yield-related traits relative to control plants. The invention also provides constructs useful in the methods of the invention.

[0006] The ever-increasing world population and the dwindling supply of arable land available for agriculture fuels research towards increasing the efficiency of agriculture. Conventional means for crop and horticultural improvements utilise selective breeding techniques to identify plants having desirable characteristics. However, such selective breeding techniques have several drawbacks, namely that these techniques are typically labour intensive and result in plants that often contain heterogeneous genetic components that may not always result in the desirable trait being passed on from parent plants. Advances in molecular biology have allowed mankind to modify the germplasm of animals and plants. Genetic engineering of plants entails the isolation and manipulation of genetic material (typically in the form of DNA or RNA) and the subsequent introduction of that genetic material into a plant. Such technology has the capacity to deliver crops or plants having various improved economic, agronomic or horticultural traits.

[0007] A trait of particular economic interest is increased yield. Yield is normally defined as the measurable produce of economic value from a crop. This may be defined in terms of quantity and/or quality. Yield is directly dependent on several factors, for example, the number and size of the organs, plant architecture (for example, the number of branches), seed production, leaf senescence and more. Root development, nutrient uptake, stress tolerance and early vigour may also be important factors in determining yield. Optimizing the abovementioned factors may therefore contribute to increasing crop yield.

[0008] Seed yield is a particularly important trait, since the seeds of many plants are important for human and animal nutrition. Crops such as corn, rice, wheat, canola and soybean account for over half the total human caloric intake, whether through direct consumption of the seeds themselves or through consumption of meat products raised on processed seeds. They are also a source of sugars, oils and many kinds of metabolites used in industrial processes. Seeds contain an embryo (the source of new shoots and roots) and an endosperm (the source of nutrients for embryo growth during germination and during early growth of seedlings). The development of a seed involves many genes, and requires the transfer of metabolites from the roots, leaves and stems into the growing seed. The endosperm, in particular, assimilates the metabolic precursors of carbohydrates, oils and proteins and synthesizes them into storage macromolecules to fill out the grain.

[0009] Plant biomass is yield for forage crops like alfalfa, silage corn and hay. Many proxies for yield have been used in grain crops. Chief amongst these are estimates of plant size. Plant size can be measured in many ways depending on species and developmental stage, but include total plant dry weight, above-ground dry weight, above-ground fresh weight, leaf area, stem volume, plant height, rosette diameter, leaf length, root length, root mass, tiller number and leaf number. Many species maintain a conservative ratio between the size of different parts of the plant at a given developmental stage. These allometric relationships are used to extrapolate from one of these measures of size to another (e.g. Tittonell et al 2005 Agric Ecosys & Environ 105: 213). Plant size at an early developmental stage will typically correlate with plant size later in development. A larger plant with a greater leaf area can typically absorb more light and carbon dioxide than a smaller plant and therefore will likely gain a greater weight during the same period (Fasoula & Tollenaar 2005 Maydica 50:39). This is in addition to the potential continuation of the micro-environmental or genetic advantage that the plant had to achieve the larger size initially. There is a strong genetic component to plant size and growth rate (e.g. ter Steege et al 2005 Plant Physiology 139:1078), and so for a range of diverse genotypes plant size under one environmental condition is likely to correlate with size under another (Hittalmani et al 2003 Theoretical Applied Genetics 107:679). In this way a standard environment is used as a proxy for the diverse and dynamic environments encountered at different locations and times by crops in the field.

[0010] Another important trait for many crops is early vigour. Improving early vigour is an important objective of modern rice breeding programs in both temperate and tropical rice cultivars. Long roots are important for proper soil anchorage in water-seeded rice. Where rice is sown directly into flooded fields, and where plants must emerge rapidly through water, longer shoots are associated with vigour. Where drill-seeding is practiced, longer mesocotyls and coleoptiles are important for good seedling emergence. The ability to engineer early vigour into plants would be of great importance in agriculture. For example, poor early vigour has been a limitation to the introduction of maize (Zea mays L.) hybrids based on Corn Belt germplasm in the European Atlantic.

[0011] Harvest index, the ratio of seed yield to aboveground dry weight, is relatively stable under many environmental conditions and so a robust correlation between plant size and grain yield can often be obtained (e.g. Rebetzke et al 2002 Crop Science 42:739). These processes are intrinsically linked because the majority of grain biomass is dependent on current or stored photosynthetic productivity by the leaves and stem of the plant (Gardener et al 1985 Physiology of Crop Plants. Iowa State University Press, pp 68-73). Therefore, selecting for plant size, even at early stages of development, has been used as an indicator for future potential yield (e.g. Tittonell et al 2005 Agric Ecosys & Environ 105: 213). When testing for the impact of genetic differences on stress tolerance, the ability to standardize soil properties, temperature, water and nutrient availability and light intensity is an intrinsic advantage of greenhouse or plant growth chamber environments compared to the field. However, artificial limitations on yield due to poor pollination due to the absence of wind or insects, or insufficient space for mature root or canopy growth, can restrict the use of these controlled environments for testing yield differences. Therefore, measurements of plant size in early development, under standardized conditions in a growth chamber or greenhouse, are standard practices to provide indication of potential genetic yield advantages.

[0012] Another trait of importance is that of improved abiotic stress tolerance. Abiotic stress is a primary cause of crop loss worldwide, reducing average yields for most major crop plants by more than 50% (Wang et al., Planta (2003), 218: 1-14). Abiotic stresses may be caused by drought, salinity, extremes of temperature, chemical toxicity, excess or deficiency of nutrients (macroelements and/or microelements), radiation and oxidative stress. The ability to increase and/or improve plant tolerance to abiotic stress would be of great economic advantage to farmers worldwide and would allow for the cultivation of crops during adverse conditions and in territories where cultivation of crops may not otherwise be possible.

[0013] Crop yield may therefore be increased by optimising one of the above-mentioned factors.

[0014] Depending on the end use, the modification of certain yield traits may be favoured over others. For example for applications such as forage or wood production, or bio-fuel resource, an increase in the vegetative parts of a plant may be desirable, and for applications such as flour, starch or oil production, an increase in seed parameters may be particularly desirable. Even amongst the seed parameters, some may be favoured over others, depending on the application. Various mechanisms may contribute to increasing seed yield, whether that is in the form of increased seed size or increased seed number.

[0015] One approach to increase yield-related traits and/or yield (seed yield and/or biomass) in plants may be through modification of the inherent growth mechanisms of a plant, such as the cell cycle or various signalling pathways involved in plant growth or in defense mechanisms.

[0016] It has now been found that various yield-related traits may be improved in plants by modulating expression in a plant of a nucleic acid encoding an Ornithine Decarboxylase (ODC) polypeptide in a plant.

[0017] In another embodiment it has now been found that various yield-related traits may be increased in plants relative to control plants, by increasing expression in a plant of a nucleic acid sequence encoding a benzothiadiazole-induced homeodomain 1 (BIHD1) polypeptide. The increased yield-related traits comprise one or more of: increased early vigour, increased total seed yield per plant, increased number of filled seeds, increased total number of seeds, and increased harvest index.

[0018] In yet another embodiment it has now been found that various enhanced yield-related traits may be enhanced in plants by modulating expression in a plant of a nucleic acid encoding a MYB30 in a plant.

[0019] In yet another embodiment it has now been found that various growth characteristics may be improved in plants by modulating expression in a plant of a nucleic acid encoding a THOM (tomato homeobox) protein in a plant.

[0020] In a further embodiment it has now been found that various yield-related traits may be increased in plants relative to control plants, by increasing expression in a plant of a nucleic acid sequence encoding a benzothiadiazole-induced homeodomain 2 (BIHD2) polypeptide. The increased yield-related traits comprise one or more of: increased early vigour, increased total seed yield per plant, increased number of filled seeds, increased total number of seeds, and increased harvest index.

### BACKGROUND

### Ornithin Decarboxylase (ODC)

[0021] Polyamines are basic aliphatic hydrocarbon compounds with two or more amino groups. Polyamines are ubiquitous natural substances occurring in organism with more than 20 types described. Examples of polyamines are spermine, spermidine and putrescine. Biological roles attributed to polyamines in plants include cell protection during abiotic stress and promotion of nucleic acid or protein biosynthesis. Enzymes catalyzing essential steps in polyamine biosynthesis include Spermine Synthase, Spermidine Synthase (SPDS) and several basic amino acid decarboxylases of the beta/alpha barrel fold type such as Ornithine Decarboxylases (ODC), Arginine Decarboxylase (ADC), S-adenosylmethionine Decarboxylase (SAMDC), Diaminopimelate Decarboxylase (DAPCD) and Carboxynorspermidine Decarboxylase (CANSDC). Genes encoding such enzymes have been isolated from prokaryotic and eukaryotic organism including plants. Beta/alpha-barrel fold decarboxylases segregate with respect to their phylogeny into four distinct groups containing ADCs, DAPDCs, ODCs, and CANSDCs (Lee et al. 2007. The Journal of Biological Chemistry Vol. 282, 27115-27125). These enzymes form homodimers. Two identical active sites are formed at the dimer interface between the N-terminal domain from one subunit and the C-terminal domain from the other.

[0022] Ornithine Decarboxylase or L-ornithine carboxy-lyase catalyses the decarboxilation of L-Ornithine to produce putrescine and CO2. ODCs are found in prokaryotes and eukaryotic organisms. The nomenclature assigned to ODC by the International Union Of Biochemistry And Molecular Biology is EC 4.1.1.17.

[0023] There has been considerable research in understanding the expression of plant polyamine metabolism-relate genes in response to stresses, and the use of such genes to alter the polyamine concentration in a cell. For example expression of a mouse ODC in carrot or a human ODC in transgenic rice plants altered the polyamine pools in the transgenic plant (Bastola and Minocha 1995. Plant Physiol. 1995. 109(1): 63-71. Lepri et al; 2001 Mol Genet Genomics. 2001 October; 266(2):303-12.). Immunomodulation of ODC in tobacco plants reportedly resulted in altered polyamine levels and developmental abnormalities and drawf phenotypes in the transgenic plants (Nolke et al; 2005. plant Biotechnology J. 3(2): 237-47. Expression of a cDNA encoding a mouse ODC in tobacco increased putrescine levels (Descenzo and Minocha 1993) Plant Mol Biol. 22, 113-127. In this study most transformant plants had normal appearance although those accumulating high levels of putrescine displayed stunted growth, wrinkled leaves and flowers with reduced stamen.

[0024] Surprisingly, it has now been found that modulating expression of a nucleic acid encoding an Ornithine Decarboxylase polypeptide gives plants having enhanced yield-related traits relative to control plants.

[0025] According to one embodiment, there is provided a method for enhancing yield related traits of a plant relative to control plants, comprising modulating expression of a nucleic acid encoding an Ornithine Decarboxylase polypeptide in a plant. The enhanced yield related traits comprised increased early vigour, increased seed yield and increased biomass.

### Benzothiadiazole-Induced Homeodomain Protein 1 (BIHD1)

[0026] DNA-binding proteins are proteins that comprise any of many DNA-binding domains and thus have a specific or general affinity to DNA. DNA-binding proteins include for example transcription factors that modulate the process of transcription, nucleases that cleave DNA molecules, and histones that are involved in DNA packaging in the cell nucleus.

[0027] Transcription factors are usually defined as proteins that show sequence-specific DNA binding affinity and that are capable of activating and/or repressing transcription. The Arabidopsis thaliana genome codes for at least 1533 transcriptional regulators, accounting for ˜5.9% of its estimated total number of genes (Riechmann et al. (2000) Science 290: 2105-2109). The Database of Rice Transcription Factors (DRTF) is a collection of known and predicted transcription factors of Oryza sativa L. ssp. indica and Oryza sativa L. ssp. japonica, and currently contains 2,025 putative transcription factors (TF) gene models in indica and 2,384 in japonica, distributed in 63 families (Gao et al. (2006) Bioinformatics 2006, 22(10):1286-7).

[0028] One of these families is the superfamily of homeodomain (HD) transcription factors involved in many aspects of developmental processes. HD transcription factors are characterized by the presence of a homeodomain (HD), which is a 60-amino acid DNA-binding domain (BD). Arabidopsis thaliana and rice contain approximately 100 HD transcription factors, which can be further classified into subfamilies based on amino acid sequence identity (Richardt et al. (2007) Plant Phys 143(4): 1452-1466). Some of these subfamilies are characterized by the presence of additional conserved domains that facilitate DNA binding and/or protein-protein interactions.

[0029] One of these subfamilies is the BEL1 (BELL-1) subfamily (Reiser et al. (1995), Cell 83: 735-742), named after an Arabidopsis mutant bell1 with defective integument formation. BEL1 transcription factors are characterized, in addition to the homeodomain, by a conserved domain called the POX domain, found exclusively in plant proteins. Two motifs further characterize BEL1 polypeptides: the SKY box, and the VSLTGL box, named after the conserved amino acid residues they comprise.

[0030] A gene encoding a BEL1 homeodomain polypeptide was isolated from Oryza sativa, and its expression shown to be increased upon treatment with benzothiadiazole (BTH), a molecule capable of inducing disease resistance, but also upon inoculation with Magnaporthe grisea pathogen (Luo et al. (2005) Plant Biol 7: 459-468). It was named Oryza sativa benzothiadiazole induced homeodomain 1 (OsBIHD1). The gene was overexpressed in tobacco using the CaMV 35S promoter (Luo et al. (2005) J Ex Bot 56(420): 2673-2682). Transgenic tobacco plants showed enhanced disease tolerance, and in some instance, germinated apical buds, abnormal roots, reduced fertility or infertility.

[0031] Surprisingly, it has now been found that increasing expression of a nucleic acid sequence encoding a benzothiadiazole-induced homeodomain protein 1 (BIHD1) gives plants having increased yield-related traits relative to control plants.

[0032] According to one embodiment, there is provided a method for increasing yield-related traits in plants relative to control plants, comprising increasing expression of a nucleic acid sequence encoding a BIHD1 polypeptide as defined herein, in a plant. The increased yield-related traits comprise one or more of: increased early vigour, increased total seed yield per plant, increased number of filled seeds, increased total number of seeds, and increased harvest index.

### MYB30 Protein

[0033] MYB domain proteins are transcription factors with a highly conserved DNA-binding domain. The MYB domain was originally described in the oncogene (v-myb) of avian myeloblastosis virus (Klempnauer et al. (1982) Cell 33, 453-63). Many vertebrates contain three genes related to v-Myb, c-Myb, A-Myb and B-Myb and other similar genes have been identified in insects, plants, fungi and slime moulds. The encoded proteins are crucial to the control of proliferation and differentiation in a number of cell types. MYB proteins contain one to four imperfect direct repeats of a conserved sequence of 50-53 amino acids which encodes a helix-turn-helix structure involved in DNA binding (Rosinski and Atchley (1998) J Mol Evol 46, 74-83). Three regularly spaced tryptophan residues, which form a tryptophan cluster in the three-dimensional helix-turn-helix structure, are characteristic of a MYB repeat. The three repeats in c-Myb are referred to as R1, R2 and R3; and repeats from other MYB proteins are categorised according to their similarity to R1, R2 or R3. MYB proteins can be classified into three subfamilies depending on the number of adjacent repeats in the MYB domain (one “MYB1R”, two “R2R3-type MYB”, three “MYB3R”). Since there is little sequence conservation outside of the MYB domain, MYB proteins have been clustered into subgroups based on conserved motifs identified outside of the MYB coding region (Stracke et al. 2001. Curr Opin Plant Biol. October; 4(5):447-56; Jiang et al. (2004) Genome Biology 5, R46). In contrast to animals, plants contain a MYB-protein subfamily that is characterised by the R2R3-type MYB domain.

[0034] Plant Myb genes are have been suggested to play important roles in regulation of secondary metabolism, cellular morphogenesis, pathogen resistance, and responses to growth regulators and stress. Additionally WO 2007099096 discloses a rice MYB4 protein useful for increasing seed yield in plants.

[0035] The MYB30 class of transcription factors constitutes a subgroup of Myb proteins sharing a common evolutionary origin and corresponding to the Group G09 reported by Jiang et al. 2004. Genes encoding some members of the MYB30 class of proteins have been implicated in physiological responses in guard cells and activation of the hypersensitive cell death response in Arabidopsis thaliana (Cominelli et al. Curr Biol. 2005 15(13):1196-200; Rivas and Roby FEBS Lett. 2006. 580(14):3498-504). The accumulation of extracellular VLCFA (very-long-chain fatty acids)-derived metabolites (leaf epidermal wax components) was affected in MYB30 knockout mutants and overexpressing lines in Arabidopsis thaliana (Vailleau et al. 2008. Plant Cell. March 7 [Epub ahead of print].).

[0036] Surprisingly, it has now been found that modulating expression of a nucleic acid encoding a MYB30 polypeptide gives plants having enhanced yield-related traits, in particular increased vegetative biomass and increased emergence vigour relative to control plants.

[0037] According to one embodiment, there is provided a method for enhanced yield-related traits of a plant relative to control plants, comprising modulating expression of a nucleic acid encoding a MYB30 polypeptide in a plant. The improved yield-related traits comprise increased biomass and increased emergence vigour.

### Tomato Homeodomain (THOM)

[0038] Homeodomain leucine zipper (HDZip) proteins constitute a family of transcription factors characterized by the presence of a DNA-binding domain (HD) and an adjacent leucine zipper (Zip) motif. The homeodomain usually consists of 60 conserved amino acid residues that form a helix1-loop-helix2-turn-helix3 that binds DNA. This DNA binding site is usually pseudopalindromic. The leucine zipper, adjacent to the C-terminal end of the homeodomain, consists of several heptad repeats (at least four) in which usually a leucine (occasionally a valine or an isoleucine) appears every seventh amino acid. The leucine zipper is important for protein dimerisation. This dimerisation is a prerequisite for DNA binding (Sessa et al. (1993) EMBO J 12(9): 3507-3517), and may proceed between two identical HDZip proteins (homodimer) or between two different HDZip proteins (heterodimer).

[0039] Homeodomain genes are present in all eucaryotes, and constitute a gene family of at least 89 members in Arabidopsis thaliana. The leucine zipper is also found by itself in eukaryotes other than plants. However, the presence of both a homeodomain and a leucine zipper is plant-specific (found in at least 47 out of the 89 proteins in Arabidopsis), and has been encountered in moss in addition to vascular plants (Sakakibara et al. (2001) Mol Biol Evol 18(4): 491-502, which is incorporated herein by reference). The leucine zipper is then located at the C-terminal end of the homeodomain, these two features overlapping by three amino acids.

[0040] The Arabidopsis HDZip genes have been classified into four different classes, HDZip I to IV, based on sequence similarity criteria (Sessa et al. In: Plant Molecular Biology (NATO ASI Series, vol H81), pp 412-426, 1994). HD-Zip I and II genes are likely involved in signal transduction networks of light, dehydration-induced ABA, or auxin. These signal transduction networks are related to the general growth regulation of plants. The overexpression of sense or antisense HD-Zip I or II mRNA usually alters growth rate and development. Most members of the HD-Zip III subfamily play roles in cell differentiation in the stele. HD-Zip IV genes are related to the differentiation of the outermost cell layer (Sakakibara et al., 2001).

[0041] Several members of the closely related HD-Zip I and II families have been related to auxin signaling and transport. HDZip I and II genes also have been implicated in light signalling responses, including shade-avoidance, de-etiolation of dark-grown seedlings and blue light signaling. Furthermore, there is accumulating evidence that many HD-Zip I and II genes are related to regulation of developmental adaptation to environmental stress conditions such as drought, for an overview, see Agalou et al., Plant Molecular Biology 66, 87-103, 2008. By random binding site selection in vitro the favoured recognition site for the Arabidopsis HD-Zip family I protein Athb-1 was shown to be composed of two 5-bp half-sites that overlap at a central position, CAAT(A/T)ATTG (Sessa et al. EMBO J. 12, 3507-3517, 1993). The HD-Zip II protein Athb-2 interacts with a similar 9-bp sequence but shows a preference for a G/C base pair at the central position. This preference was shown to be determined by the presence of Glu and Thr residues at positions 46 and 56 of the 60-amino acid homeodomain, where HD-Zip I proteins characteristically contain, respectively, an Ala and a Trp residue (Sessa et al. J. Mol. Biol. 274, 303-309, 1997). THOM1 from tomato (Meisner and Theres, Planta 195, 541-547, 1995) is highly expressed in the vegetative shoot apical meristem, the floral meristem and axillary meristems. Young derivatives of these meristems show similar levels of THOM1 transcripts which decrease with increasing age of the respective tissue. HB-4, a member of the HD-Zip class II proteins and homologous to THOM, was shown to be induced in Arabidopsis by far-red-rich light treatment; whereas in sunflower, HB-4 is regulated by water availability and abscisic acid. It was postulated that sunflower HB-4 is involved in increasing desiccation tolerance (Manavella et al., Plant J. 48, 125-137, 2006).

[0042] Surprisingly, it has now been found that modulating expression of a nucleic acid encoding a THOM polypeptide gives plants having enhanced yield-related traits, in particular increased seed yield relative to control plants.

[0043] According one embodiment, there is provided a method for improving yield related traits of a plant relative to control plants, comprising modulating expression of a nucleic acid encoding a THOM polypeptide in a plant.

### Benzothiadiazole-Induced Homeodomain Protein 2 (BIHD2)

[0044] DNA-binding proteins are proteins that comprise any of many DNA-binding domains and thus have a specific or general affinity to DNA. DNA-binding proteins include for example transcription factors that modulate the process of transcription, nucleases that cleave DNA molecules, and histones that are involved in DNA packaging in the cell nucleus.

[0045] Transcription factors are usually defined as proteins that show sequence-specific DNA binding affinity and that are capable of activating and/or repressing transcription. The Arabidopsis thaliana genome codes for at least 1533 transcriptional regulators, accounting for ˜5.9% of its estimated total number of genes (Riechmann et al. (2000) Science 290: 2105-2109). The Database of Rice Transcription Factors (DRTF) is a collection of known and predicted transcription factors of Oryza sativa L. ssp. indica and Oryza sativa L. ssp. japonica, and currently contains 2,025 putative transcription factors (TF) gene models in indica and 2,384 in japonica, distributed in 63 families (Gao et al. (2006) Bioinformatics 2006, 22(10):1286-7).

[0046] One of these families is the superfamily of homeodomain (HD) transcription factors involved in many aspects of developmental processes. HD transcription factors are characterized by the presence of a homeodomain (HD), which is a 60-amino acid DNA-binding domain (BD). Arabidopsis thaliana and rice contain approximately 100 HD transcription factors, which can be further classified into subfamilies based on amino acid sequence identity (Richardt et al. (2007) Plant Phys 143(4): 1452-1466). Some of these subfamilies are characterized by the presence of additional conserved domains that facilitate DNA binding and/or protein-protein interactions.

[0047] One of these subfamilies is the BEL1 (BELL-1) subfamily (Reiser et al. (1995), Cell 83: 735-742), named after an Arabidopsis mutant bell1 with defective integument formation. BEL1 transcription factors are characterized, in addition to the homeodomain, by a conserved domain called the POX domain, found exclusively in plant proteins. Two motifs further characterize BEL1 polypeptides: the SKY box, and the VSLTGL box, named after the conserved amino acid residues they comprise.

[0048] A gene encoding a BEL1 homeodomain polypeptide was isolated from Oryza sativa, and its expression shown to be increased upon treatment with benzothiadiazole (BTH), a molecule capable of inducing disease resistance, but also upon inoculation with Magnaporthe grisea pathogen (Luo et al. (2005) Plant Biol 7: 459-468). It was named Oryza sativa benzothiadiazole induced homeodomain 1 (OsBIHD1). The gene was overexpressed in tobacco using the CaMV 35S promoter (Luo et al. (2005) J Ex Bot 56(420): 2673-2682). Transgenic tobacco plants showed enhanced disease tolerance, and in some instance, germinated apical buds, abnormal roots, reduced fertility or infertility.

[0049] Surprisingly, it has now been found that increasing expression of a nucleic acid sequence encoding a benzothiadiazole-induced homeodomain protein 2 (BIHD2) gives plants having increased yield-related traits relative to control plants.

[0050] According to one embodiment, there is provided a method for increasing yield-related traits in plants relative to control plants, comprising increasing expression of a nucleic acid sequence encoding a BIHD2 polypeptide as defined herein, in a plant. The increased yield-related traits comprise one or more of: increased early vigour, increased total seed yield per plant, increased number of filled seeds, increased total number of seeds, and increased harvest index.

### DEFINITIONS

### Polypeptide(s)/Protein(s)

[0051] The terms “polypeptide” and “protein” are used interchangeably herein and refer to amino acids in a polymeric form of any length, linked together by peptide bonds.

### Polynucleotide(s)/Nucleic Acid(s)/Nucleic Acid Sequence(s)/Nucleotide Sequence(s)

[0052] The terms “polynucleotide(s)”, “nucleic acid sequence(s)”, “nucleotide sequence(s)”, “nucleic acid(s)”, “nucleic acid molecule” are used interchangeably herein and refer to nucleotides, either ribonucleotides or deoxyribonucleotides or a combination of both, in a polymeric unbranched form of any length.

### Control Plant(s)

[0053] The choice of suitable control plants is a routine part of an experimental setup and may include corresponding wild type plants or corresponding plants without the gene of interest. The control plant is typically of the same plant species or even of the same variety as the plant to be assessed. The control plant may also be a nullizygote of the plant to be assessed. Nullizygotes are individuals missing the transgene by segregation. A “control plant” as used herein refers not only to whole plants, but also to plant parts, including seeds and seed parts.

### Homologue(s)

[0054] “Homologues” of a protein encompass peptides, oligopeptides, polypeptides, proteins and enzymes having amino acid substitutions, deletions and/or insertions relative to the unmodified protein in question and having similar biological and functional activity as the unmodified protein from which they are derived.

[0055] A deletion refers to removal of one or more amino acids from a protein.

[0056] An insertion refers to one or more amino acid residues being introduced into a predetermined site in a protein. Insertions may comprise N-terminal and/or C-terminal fusions as well as intra-sequence insertions of single or multiple amino acids. Generally, insertions within the amino acid sequence will be smaller than N- or C-terminal fusions, of the order of about 1 to 10 residues. Examples of N- or C-terminal fusion proteins or peptides include the binding domain or activation domain of a transcriptional activator as used in the yeast two-hybrid system, phage coat proteins, (histidine)-6-tag, glutathione S-transferase-tag, protein A, maltose-binding protein, dihydrofolate reductase, Tag•100 epitope, c-myc epitope, FLAG®-epitope, lacZ, CMP (calmodulin-binding peptide), HA epitope, protein C epitope and VSV epitope.

[0057] A substitution refers to replacement of amino acids of the protein with other amino acids having similar properties (such as similar hydrophobicity, hydrophilicity, antigenicity, propensity to form or break α-helical structures or β-sheet structures). Amino acid substitutions are typically of single residues, but may be clustered depending upon functional constraints placed upon the polypeptide; insertions will usually be of the order of about 1 to 10 amino acid residues. The amino acid substitutions are preferably conservative amino acid substitutions. Conservative substitution tables are well known in the art (see for example Creighton (1984) Proteins. W.H. Freeman and Company (Eds) and Table 1 below).

TABLE 1
Examples of conserved amino acid substitutions

| | Conservative | | Conservative |
|---|---|---|---|
| Residue | Substitutions | Residue | Substitutions |
| Ala | Ser | Leu | Ile; Val |
| Arg | Lys | Lys | Arg; Gln |
| Asn | Gln; His | Met | Leu; Ile |
| Asp | Glu | Phe | Met; Leu; Tyr |
| Gln | Asn | Ser | Thr; Gly |
| Cys | Ser | Thr | Ser; Val |
| Glu | Asp | Trp | Tyr |
| Gly | Pro | Tyr | Trp; Phe |
| His | Asn; Gln | Val | Ile; Leu |
| Ile | Leu, Val | | |

[0058] Amino acid substitutions, deletions and/or insertions may readily be made using peptide synthetic techniques well known in the art, such as solid phase peptide synthesis and the like, or by recombinant DNA manipulation. Methods for the manipulation of DNA sequences to produce substitution, insertion or deletion variants of a protein are well known in the art. For example, techniques for making substitution mutations at predetermined sites in DNA are well known to those skilled in the art and include M13 mutagenesis, T7-Gen in vitro mutagenesis (USB, Cleveland, Ohio), QuickChange Site Directed mutagenesis (Stratagene, San Diego, Calif.), PCR-mediated site-directed mutagenesis or other site-directed mutagenesis protocols.

### Derivatives

[0059] “Derivatives” include peptides, oligopeptides, polypeptides which may, compared to the amino acid sequence of the naturally-occurring form of the protein, such as the protein of interest, comprise substitutions of amino acids with non-naturally occurring amino acid residues, or additions of non-naturally occurring amino acid residues. “Derivatives” of a protein also encompass peptides, oligopeptides, polypeptides which comprise naturally occurring altered (glycosylated, acylated, prenylated, phosphorylated, myristoylated, sulphated etc.) or non-naturally altered amino acid residues compared to the amino acid sequence of a naturally-occurring form of the polypeptide. A derivative may also comprise one or more non-amino acid substituents or additions compared to the amino acid sequence from which it is derived, for example a reporter molecule or other ligand, covalently or non-covalently bound to the amino acid sequence, such as a reporter molecule which is bound to facilitate its detection, and non-naturally occurring amino acid residues relative to the amino acid sequence of a naturally-occurring protein. Furthermore, “derivatives” also include fusions of the naturally-occurring form of the protein with tagging peptides such as FLAG, HIS6 or thioredoxin (for a review of tagging peptides, see Terpe, Appl. Microbiol. Biotechnol. 60, 523-533, 2003).

### Orthologue(s)/Paralogue(s)

[0060] Orthologues and paralogues encompass evolutionary concepts used to describe the ancestral relationships of genes. Paralogues are genes within the same species that have originated through duplication of an ancestral gene; orthologues are genes from different organisms that have originated through speciation, and are also derived from a common ancestral gene.

### Domain

[0061] The term “domain” refers to a set of amino acids conserved at specific positions along an alignment of sequences of evolutionarily related proteins. While amino acids at other positions can vary between homologues, amino acids that are highly conserved at specific positions indicate amino acids that are likely essential in the structure, stability or function of a protein. Identified by their high degree of conservation in aligned sequences of a family of protein homologues, they can be used as identifiers to determine if any polypeptide in question belongs to a previously identified polypeptide family.

### Motif/Consensus Sequence/Signature

[0062] The term “motif” or “consensus sequence” or “signature” refers to a short conserved region in the sequence of evolutionarily related proteins. Motifs are frequently highly conserved parts of domains, but may also include only part of the domain, or be located outside of conserved domain (if all of the amino acids of the motif fall outside of a defined domain).

### Hybridisation

[0063] The term “hybridisation” as defined herein is a process wherein substantially homologous complementary nucleotide sequences anneal to each other. The hybridisation process can occur entirely in solution, i.e. both complementary nucleic acids are in solution. The hybridisation process can also occur with one of the complementary nucleic acids immobilised to a matrix such as magnetic beads, Sepharose beads or any other resin. The hybridisation process can furthermore occur with one of the complementary nucleic acids immobilised to a solid support such as a nitro-cellulose or nylon membrane or immobilised by e.g. photolithography to, for example, a siliceous glass support (the latter known as nucleic acid arrays or microarrays or as nucleic acid chips). In order to allow hybridisation to occur, the nucleic acid molecules are generally thermally or chemically denatured to melt a double strand into two single strands and/or to remove hairpins or other secondary structures from single stranded nucleic acids.

[0064] The term “stringency” refers to the conditions under which a hybridisation takes place. The stringency of hybridisation is influenced by conditions such as temperature, salt concentration, ionic strength and hybridisation buffer composition. Generally, low stringency conditions are selected to be about 30° C. lower than the thermal melting point (Tₘ) for the specific sequence at a defined ionic strength and pH. Medium stringency conditions are when the temperature is 20° C. below Tₘ, and high stringency conditions are when the temperature is 10° C. below Tₘ. High stringency hybridisation conditions are typically used for isolating hybridising sequences that have high sequence similarity to the target nucleic acid sequence. However, nucleic acids may deviate in sequence and still encode a substantially identical polypeptide, due to the degeneracy of the genetic code. Therefore medium stringency hybridisation conditions may sometimes be needed to identify such nucleic acid molecules.

[0065] The Tm is the temperature under defined ionic strength and pH, at which 50% of the target sequence hybridises to a perfectly matched probe. The Tₘ is dependent upon the solution conditions and the base composition and length of the probe. For example, longer sequences hybridise specifically at higher temperatures. The maximum rate of hybridisation is obtained from about 16° C. up to 32° C. below Tₘ. The presence of monovalent cations in the hybridisation solution reduce the electrostatic repulsion between the two nucleic acid strands thereby promoting hybrid formation; this effect is visible for sodium concentrations of up to 0.4M (for higher concentrations, this effect may be ignored). Formamide reduces the melting temperature of DNA-DNA and DNA-RNA duplexes with 0.6 to 0.7° C. for each percent formamide, and addition of 50% formamide allows hybridisation to be performed at 30 to 45° C., though the rate of hybridisation will be lowered. Base pair mismatches reduce the hybridisation rate and the thermal stability of the duplexes. On average and for large probes, the Tm decreases about 1° C. per % base mismatch. The Tm may be calculated using the following equations, depending on the types of hybrids:

1) DNA-DNA hybrids (Meinkoth and Wahl, Anal. Biochem., 138: 267-284, 1984):

Tₘ=81.5° C.+16.6×log₁₀[Na⁺]^{a}+0.41×%[G/C^{b}]−500×[L^{c}]⁻¹−0.61×% formamide

2) DNA-RNA or RNA-RNA hybrids:

Tₘ=79.8+18.5(log₁₀[Na⁺]^{a})+0.58(% G/C^{b})+11.8(% G/C^{b})²−820/L^{c}

3) oligo-DNA or oligo-RNAs hybrids:

For <20 nucleotides: Tₘ=2(Iₙ)

For 20-35 nucleotides: Tₘ=22+1.46(Iₙ)

^{a} or for other monovalent cation, but only accurate in the 0.01-0.4 M range.
^{b} only accurate for % GC in the 30% to 75% range.
^{c} L=length of duplex in base pairs.
^{d} oligo, oligonucleotide; Iₙ, =effective length of primer=2×(no. of G/C)+(no. of A/T).

[0066] Non-specific binding may be controlled using any one of a number of known techniques such as, for example, blocking the membrane with protein containing solutions, additions of heterologous RNA, DNA, and SDS to the hybridisation buffer, and treatment with Rnase. For non-homologous probes, a series of hybridizations may be performed by varying one of (i) progressively lowering the annealing temperature (for example from 68° C. to 42° C.) or (ii) progressively lowering the formamide concentration (for example from 50% to 0%). The skilled artisan is aware of various parameters which may be altered during hybridisation and which will either maintain or change the stringency conditions.

[0067] Besides the hybridisation conditions, specificity of hybridisation typically also depends on the function of post-hybridisation washes. To remove background resulting from non-specific hybridisation, samples are washed with dilute salt solutions. Critical factors of such washes include the ionic strength and temperature of the final wash solution: the lower the salt concentration and the higher the wash temperature, the higher the stringency of the wash. Wash conditions are typically performed at or below hybridisation stringency. A positive hybridisation gives a signal that is at least twice of that of the background. Generally, suitable stringent conditions for nucleic acid hybridisation assays or gene amplification detection procedures are as set forth above. More or less stringent conditions may also be selected. The skilled artisan is aware of various parameters which may be altered during washing and which will either maintain or change the stringency conditions.

[0068] For example, typical high stringency hybridisation conditions for DNA hybrids longer than 50 nucleotides encompass hybridisation at 65° C. in 1×SSC or at 42° C. in 1×SSC and 50% formamide, followed by washing at 65° C. in 0.3×SSC. Examples of medium stringency hybridisation conditions for DNA hybrids longer than 50 nucleotides encompass hybridisation at 50° C. in 4×SSC or at 40° C. in 6×SSC and 50% formamide, followed by washing at 50° C. in 2×SSC. The length of the hybrid is the anticipated length for the hybridising nucleic acid. When nucleic acids of known sequence are hybridised, the hybrid length may be determined by aligning the sequences and identifying the conserved regions described herein. 1×SSC is 0.15M NaCl and 15 mM sodium citrate; the hybridisation solution and wash solutions may additionally include 5×Denhardt's reagent, 0.5-1.0% SDS, 100 μg/ml denatured, fragmented salmon sperm DNA, 0.5% sodium pyrophosphate.

[0069] For the purposes of defining the level of stringency, reference can be made to Sambrook et al. (2001) Molecular Cloning: a laboratory manual, 3rd Edition, Cold Spring Harbor Laboratory Press, CSH, New York or to Current Protocols in Molecular Biology, John Wiley & Sons, N.Y. (1989 and yearly updates).

### Splice Variant

[0070] The term “splice variant” as used herein encompasses variants of a nucleic acid sequence in which selected introns and/or exons have been excised, replaced, displaced or added, or in which introns have been shortened or lengthened. Such variants will be ones in which the biological activity of the protein is substantially retained; this may be achieved by selectively retaining functional segments of the protein. Such splice variants may be found in nature or may be manmade. Methods for predicting and isolating such splice variants are well known in the art (see for example Foissac and Schiex (2005) BMC Bioinformatics 6: 25).

### Allelic Variant

[0071] Alleles or allelic variants are alternative forms of a given gene, located at the same chromosomal position. Allelic variants encompass Single Nucleotide Polymorphisms (SNPs), as well as Small Insertion/Deletion Polymorphisms (INDELs). The size of INDELs is usually less than 100 bp. SNPs and INDELs form the largest set of sequence variants in naturally occurring polymorphic strains of most organisms.

### Gene Shuffling/Directed Evolution

[0072] Gene shuffling or directed evolution consists of iterations of DNA shuffling followed by appropriate screening and/or selection to generate variants of nucleic acids or portions thereof encoding proteins having a modified biological activity (Castle et al., (2004) Science 304(5674): 1151-4; U.S. Pat. Nos. 5,811,238 and 6,395,547).

### Regulatory Element/Control Sequence/Promoter

[0073] The terms “regulatory element”, “control sequence” and “promoter” are all used interchangeably herein and are to be taken in a broad context to refer to regulatory nucleic acid sequences capable of effecting expression of the sequences to which they are ligated. The term “promoter” typically refers to a nucleic acid control sequence located upstream from the transcriptional start of a gene and which is involved in recognising and binding of RNA polymerase and other proteins, thereby directing transcription of an operably linked nucleic acid. Encompassed by the aforementioned terms are transcriptional regulatory sequences derived from a classical eukaryotic genomic gene (including the TATA box which is required for accurate transcription initiation, with or without a CCAAT box sequence) and additional regulatory elements (i.e. upstream activating sequences, enhancers and silencers) which alter gene expression in response to developmental and/or external stimuli, or in a tissue-specific manner. Also included within the term is a transcriptional regulatory sequence of a classical prokaryotic gene, in which case it may include a −35 box sequence and/or −10 box transcriptional regulatory sequences. The term “regulatory element” also encompasses a synthetic fusion molecule or derivative that confers, activates or enhances expression of a nucleic acid molecule in a cell, tissue or organ.

[0074] A “plant promoter” comprises regulatory elements, which mediate the expression of a coding sequence segment in plant cells. Accordingly, a plant promoter need not be of plant origin, but may originate from viruses or micro-organisms, for example from viruses which attack plant cells. The “plant promoter” can also originate from a plant cell, e.g. from the plant which is transformed with the nucleic acid sequence to be expressed in the inventive process and described herein. This also applies to other “plant” regulatory signals, such as “plant” terminators. The promoters upstream of the nucleotide sequences useful in the methods of the present invention can be modified by one or more nucleotide substitution(s), insertion(s) and/or deletion(s) without interfering with the functionality or activity of either the promoters, the open reading frame (ORF) or the 3′-regulatory region such as terminators or other 3′ regulatory regions which are located away from the ORF. It is furthermore possible that the activity of the promoters is increased by modification of their sequence, or that they are replaced completely by more active promoters, even promoters from heterologous organisms. For expression in plants, the nucleic acid molecule must, as described above, be linked operably to or comprise a suitable promoter which expresses the gene at the right point in time and with the required spatial expression pattern.

[0075] For the identification of functionally equivalent promoters, the promoter strength and/or expression pattern of a candidate promoter may be analysed for example by operably linking the promoter to a reporter gene and assaying the expression level and pattern of the reporter gene in various tissues of the plant. Suitable well-known reporter genes include for example beta-glucuronidase or beta-galactosidase. The promoter activity is assayed by measuring the enzymatic activity of the beta-glucuronidase or beta-galactosidase. The promoter strength and/or expression pattern may then be compared to that of a reference promoter (such as the one used in the methods of the present invention). Alternatively, promoter strength may be assayed by quantifying mRNA levels or by comparing mRNA levels of the nucleic acid used in the methods of the present invention, with mRNA levels of housekeeping genes such as 18S rRNA, using methods known in the art, such as Northern blotting with densitometric analysis of autoradiograms, quantitative real-time PCR or RT-PCR (Heid et al., 1996 Genome Methods 6: 986-994). Generally by “weak promoter” is intended a promoter that drives expression of a coding sequence at a low level. By “low level” is intended at levels of about 1/10,000 transcripts to about 1/100,000 transcripts, to about 1/500,0000 transcripts per cell. Conversely, a “strong promoter” drives expression of a coding sequence at high level, or at about 1/10 transcripts to about 1/100 transcripts to about 1/1000 transcripts per cell. Generally, by “medium strength promoter” is intended a promoter that drives expression of a coding sequence at a lower level than a strong promoter, in particular at a level that is in all instances below that obtained when under the control of a 35S CaMV promoter.

### Operably Linked

[0076] The term “operably linked” as used herein refers to a functional linkage between the promoter sequence and the gene of interest, such that the promoter sequence is able to initiate transcription of the gene of interest.

### Constitutive Promoter

[0077] A “constitutive promoter” refers to a promoter that is transcriptionally active during most, but not necessarily all, phases of growth and development and under most environmental conditions, in at least one cell, tissue or organ. Table 2a below gives examples of constitutive promoters.

TABLE 2a
Examples of constitutive promoters

| Gene Source | Reference |
|---|---|
| Actin | McElroy et al, Plant Cell, 2: 163-171, 1990 |
| HMGP | WO 2004/070039 |
| CAMV 35S | Odell et al, Nature, 313: 810-812, 1985 |
| CaMV 19S | Nilsson et al., Physiol. Plant. 100: 456-462, 1997 |
| GOS2 | de Pater et al, Plant J Nov; 2(6): 837-44, 1992, |
| | WO 2004/065596 |
| Ubiquitin | Christensen et al, Plant Mol. Biol. 18: |
| | 675-689, 1992 |
| Rice cyclophilin | Buchholz et al, Plant Mol Biol. 25(5): |
| | 837-43, 1994 |
| Maize H3 histone | Lepetit et al, Mol. Gen. Genet. 231: |
| | 276-285, 1992 |
| Alfalfa H3 histone | Wu et al. Plant Mol. Biol. 11: 641-649, 1988 |
| Actin 2 | An et al, Plant J. 10(1); 107-121, 1996 |
| 34S FMV | Sanger et al., Plant. Mol. Biol., 14, 1990: |
| | 433-443 |
| Rubisco small subunit | U.S. Pat. No. 4,962,028 |
| OCS | Leisner (1988) Proc Natl Acad Sci USA 85(5): |
| | 2553 |
| SAD1 | Jain et al., Crop Science, 39 (6), 1999: 1696 |
| SAD2 | Jain et al., Crop Science, 39 (6), 1999: 1696 |
| nos | Shaw et al. (1984) Nucleic Acids Res. 12(20): |
| | 7831-7846 |
| V-ATPase | WO 01/14572 |
| Super promoter | WO 95/14098 |
| G-box proteins | WO 94/12015 |

### Ubiquitous Promoter

[0078] A ubiquitous promoter is active in substantially all tissues or cells of an organism.

### Developmentally-Regulated Promoter

[0079] A developmentally-regulated promoter is active during certain developmental stages or in parts of the plant that undergo developmental changes.

### Inducible Promoter

[0080] An inducible promoter has induced or increased transcription initiation in response to a chemical (for a review see Gatz 1997, Annu. Rev. Plant Physiol. Plant Mol. Biol., 48:89-108), environmental or physical stimulus, or may be “stress-inducible”, i.e. activated when a plant is exposed to various stress conditions, or a “pathogen-inducible” i.e. activated when a plant is exposed to exposure to various pathogens.

### Organ-Specific/Tissue-Specific Promoter

[0081] An organ-specific or tissue-specific promoter is one that is capable of preferentially initiating transcription in certain organs or tissues, such as the leaves, roots, seed tissue etc. For example, a “root-specific promoter” is a promoter that is transcriptionally active predominantly in plant roots, substantially to the exclusion of any other parts of a plant, whilst still allowing for any leaky expression in these other plant parts. Promoters able to initiate transcription in certain cells only are referred to herein as “cell-specific”.

[0082] Examples of root-specific promoters are listed in Table 2b below:

TABLE 2b
Examples of root-specific promoters

| Gene Source | Reference |
|---|---|
| RCc3 | Plant Mol Biol. 1995 Jan; 27(2): 237-48 |
| Arabidopsis PHT1 | Kovama et al., 2005; Mudge et al. (2002, |
| | Plant J. 31: 341) |
| Medicago phosphate | Xiao et al., 2006 |
| transporter | |
| Arabidopsis Pyk10 | Nitz et al. (2001) Plant Sci 161(2): 337-346 |
| root-expressible genes | Tingey et al., EMBO J. 6: 1, 1987. |
| tobacco auxin-inducible | Van der Zaal et al., Plant Mol. Biol. 16, 983, |
| gene | 1991. |
| β-tubulin | Oppenheimer, et al., Gene 63: 87, 1988. |
| tobacco root-specific | Conkling, et al., Plant Physiol. 93: 1203, 1990. |
| genes | |
| B. napus G1-3b gene | U.S. Pat. No. 5,401,836 |
| SbPRP1 | Suzuki et al., Plant Mol. Biol. 21: 109-119, |
| | 1993. |
| LRX1 | Baumberger et al. 2001, Genes & Dev. 15: |
| | 1128 |
| BTG-26 Brassica napus | US 20050044585 |
| LeAMT1 (tomato) | Lauter et al. (1996, PNAS 3: 8139) |
| The LeNRT1-1 (tomato) | Lauter et al. (1996, PNAS 3: 8139) |
| class I patatin gene | Liu et al., Plant Mol. Biol. 153: 386-395, 1991. |
| (potato) | |
| KDC1 (Daucus carota) | Downey et al. (2000, J. Biol. Chem. 275: |
| | 39420) |
| TobRB7 gene | W Song (1997) PhD Thesis, North Carolina |
| | State University, Raleigh, NC USA |
| OsRAB4a (rice) | Wang et al. 2002, Plant Sci. 163: 273 |
| ALF5 (Arabidopsis) | Diener et al. (2001, Plant Cell 13: 1625) |
| NRT2; 1Np | Quesada et al. (1997, Plant Mol. Biol. 34: 265) |
| (N. plumbaginifolia) | |

[0083] A seed-specific promoter is transcriptionally active predominantly in seed tissue, but not necessarily exclusively in seed tissue (in cases of leaky expression). The seed-specific promoter may be active during seed development and/or during germination. The seed specific promoter may be endosperm/aleurone/embryo specific. Examples of seed-specific promoters (endosperm/aleurone/embryo specific) are shown in Table 2c to Table 2f below. Further examples of seed-specific promoters are given in Qing Qu and Takaiwa (Plant Biotechnol. J. 2, 113-125, 2004), which disclosure is incorporated by reference herein as if fully set forth.

TABLE 2c
Examples of seed-specific promoters

| Gene source | Reference |
|---|---|
| seed-specific genes | Simon et al., Plant Mol. Biol. 5: 191, 1985; |
| | Scofield et al., J. Biol. Chem. 262: 12202, 1987.; |
| | Baszczynski et al., Plant Mol. Biol. 14: 633, 1990. |
| Brazil Nut albumin | Pearson et al., Plant Mol. Biol. 18: 235-245, 1992. |
| legumin | Ellis et al., Plant Mol. Biol. 10: 203-214, 1988. |
| glutelin (rice) | Takaiwa et al., Mol. Gen. Genet. 208: 15-22, 1986; |
| | Takaiwa et al., FEBS Letts. 221: 43-47, 1987. |
| zein | Matzke et al Plant Mol Biol, 14(3): 323-32 1990 |
| napA | Stalberg et al, Planta 199: 515-519, 1996. |
| wheat LMW and HMW glutenin-1 | Mol Gen Genet 216: 81-90, 1989; NAR 17: 461-2, 1989 |
| wheat SPA | Albani et al, Plant Cell, 9: 171-184, 1997 |
| wheat α, β, γ-gliadins | EMBO J. 3: 1409-15, 1984 |
| barley Itr1 promoter | Diaz et al. (1995) Mol Gen Genet 248(5): 592-8 |
| barley B1, C, D, hordein | Theor Appl Gen 98: 1253-62, 1999; Plant J 4: 343-55, |
| | 1993; Mol Gen Genet 250: 750-60, 1996 |
| barley DOF | Mena et al, The Plant Journal, 116(1): 53-62, 1998 |
| blz2 | EP99106056.7 |
| synthetic promoter | Vicente-Carbajosa et al., Plant J. 13: 629-640, 1998. |
| rice prolamin NRP33 | Wu et al, Plant Cell Physiology 39(8) 885-889, 1998 |
| rice a-globulin Glb-1 | Wu et al, Plant Cell Physiology 39(8) 885-889, 1998 |
| rice OSH1 | Sato et al, Proc. Natl. Acad. Sci. USA, 93: 8117-8122, |
| | 1996 |
| rice α-globulin REB/OHP-1 | Nakase et al. Plant Mol. Biol. 33: 513-522, 1997 |
| rice ADP-glucose pyrophosphorylase | Trans Res 6: 157-68, 1997 |
| maize ESR gene family | Plant J 12: 235-46, 1997 |
| sorghum α-kafirin | DeRose et al., Plant Mol. Biol 32: 1029-35, 1996 |
| KNOX | Postma-Haarsma et al, Plant Mol. Biol. 39: 257-71, 1999 |
| rice oleosin | Wu et al, J. Biochem. 123: 386, 1998 |
| sunflower oleosin | Cummins et al., Plant Mol. Biol. 19: 873-876, 1992 |
| PRO0117, putative rice 40S | WO 2004/070039 |
| ribosomal protein | |
| PRO0136, rice alanine | unpublished |
| aminotransferase | |
| PRO0147, trypsin inhibitor ITR1 | unpublished |
| (barley) | |
| PRO0151, rice WSI18 | WO 2004/070039 |
| PRO0175, rice RAB21 | WO 2004/070039 |
| PRO005 | WO 2004/070039 |
| PRO0095 | WO 2004/070039 |
| α-amylase (Amy32b) | Lanahan et al, Plant Cell 4: 203-211, 1992; Skriver et al, |
| | Proc Natl Acad Sci USA 88: 7266-7270, 1991 |
| cathepsin β-like gene | Cejudo et al, Plant Mol Biol 20: 849-856, 1992 |
| Barley Ltp2 | Kalla et al., Plant J. 6: 849-60, 1994 |
| Chi26 | Leah et al., Plant J. 4: 579-89, 1994 |
| Maize B-Peru | Selinger et al., Genetics 149; 1125-38, 1998 |

TABLE 2d
examples of endosperm-specific promoters

| Gene source | Reference |
|---|---|
| glutelin (rice) | Takaiwa et al. (1986) Mol Gen Genet 208: 15-22; |
| | Takaiwa et al. (1987) FEBS Letts. 221: 43-47 |
| zein | Matzke et al., (1990) Plant Mol Biol 14(3): |
| | 323-32 |
| wheat LMW and | Colot et al. (1989) Mol Gen Genet 216: 81-90, |
| HMW | |
| glutenin-1 | Anderson et al. (1989) NAR 17: 461-2 |
| wheat SPA | Albani et al. (1997) Plant Cell 9: 171-184 |
| wheat gliadins | Rafalski et al. (1984) EMBO 3: 1409-15 |
| barley Itr1 promoter | Diaz et al. (1995) Mol Gen Genet 248(5): 592-8 |
| barley B1, C, D, | Cho et al. (1999) Theor Appl Genet 98: 1253-62; |
| hordein | Muller et al. (1993) Plant J 4: 343-55; |
| | Sorenson et al. (1996) Mol Gen Genet 250: |
| | 750-60 |
| barley DOF | Mena et al, (1998) Plant J 116(1): 53-62 |
| blz2 | Onate et al. (1999) J Biol Chem 274(14): 9175-82 |
| synthetic promoter | Vicente-Carbajosa et al. (1998) Plant J 13: |
| | 629-640 |
| rice prolamin NRP33 | Wu et al, (1998) Plant Cell Physiol 39(8) 885-889 |
| rice globulin Glb-1 | Wu et al. (1998) Plant Cell Physiol 39(8) 885-889 |
| rice globulin | Nakase et al. (1997) Plant Molec Biol 33: |
| REB/OHP-1 | 513-522 |
| rice ADP-glucose | Russell et al. (1997) Trans Res 6: 157-68 |
| pyrophosphorylase | |
| maize ESR gene | Opsahl-Ferstad et al. (1997) Plant J 12: 235-46 |
| family | |
| sorghum kafirin | DeRose et al. (1996) Plant Mol Biol 32: 1029-35 |

TABLE 2e
Examples of embryo specific promoters:

| Gene source | Reference |
|---|---|
| rice OSH1 | Sato et al, Proc. Natl. Acad. Sci. USA, 93: 8117-8122, |
| | 1996 |
| KNOX | Postma-Haarsma et al, Plant Mol. Biol. 39: 257-71, 1999 |
| PRO0151 | WO 2004/070039 |
| PRO0175 | WO 2004/070039 |
| PRO005 | WO 2004/070039 |
| PRO0095 | WO 2004/070039 |

TABLE 2f
Examples of aleurone-specific promoters:

| Gene source | Reference |
|---|---|
| α-amylase (Amy32b) | Lanahan et al, Plant Cell 4: 203-211, 1992; |
| | Skriver et al, Proc Natl Acad Sci USA 88: |
| | 7266-7270, 1991 |
| cathepsin β-like gene | Cejudo et al, Plant Mol Biol 20: 849-856, 1992 |
| Barley Ltp2 | Kalla et al., Plant J. 6: 849-60, 1994 |
| Chi26 | Leah et al., Plant J. 4: 579-89, 1994 |
| Maize B-Peru | Selinger et al., Genetics 149; 1125-38, 1998 |

[0084] A green tissue-specific promoter as defined herein is a promoter that is transcriptionally active predominantly in green tissue, substantially to the exclusion of any other parts of a plant, whilst still allowing for any leaky expression in these other plant parts.

[0085] Examples of green tissue-specific promoters which may be used to perform the methods of the invention are shown in Table 2g below.

TABLE 2g
Examples of green tissue-specific promoters

| Gene | Expression | Reference |
|---|---|---|
| Maize Orthophosphate dikinase | Leaf specific | Fukavama et al., 2001 |
| Maize Phosphoenolpyruvate | Leaf specific | Kausch et al., 2001 |
| carboxylase | | |
| Rice Phosphoenolpyruvate | Leaf specific | Liu et al., 2003 |
| carboxylase | | |
| Rice small subunit Rubisco | Leaf specific | Nomura et al., 2000 |
| rice beta expansin EXBP9 | Shoot specific | WO 2004/070039 |
| Pigeonpea small subunit Rubisco | Leaf specific | Panguluri et al., 2005 |
| Pea RBCS3A | Leaf specific | |

[0086] Another example of a tissue-specific promoter is a meristem-specific promoter, which is transcriptionally active predominantly in meristematic tissue, substantially to the exclusion of any other parts of a plant, whilst still allowing for any leaky expression in these other plant parts. Examples of green meristem-specific promoters which may be used to perform the methods of the invention are shown in Table 2h below.

TABLE 2h
Examples of meristem-specific promoters

| Gene source | Expression pattern | Reference |
|---|---|---|
| rice OSH1 | Shoot apical meristem, | Sato et al. (1996) Proc. |
| | from embryo globular | Natl. Acad. Sci. USA, 93: |
| | stage to seedling stage | 8117-8122 |
| Rice metallothionein | Meristem specific | BAD87835.1 |
| WAK1 & WAK 2 | Shoot and root apical | Wagner & Kohorn |
| | meristems, and in | (2001) Plant Cell 13(2): |
| | expanding leaves and | 303-318 |
| | sepals | |

### Terminator

[0087] The term “terminator” encompasses a control sequence which is a DNA sequence at the end of a transcriptional unit which signals 3′ processing and polyadenylation of a primary transcript and termination of transcription. The terminator can be derived from the natural gene, from a variety of other plant genes, or from T-DNA. The terminator to be added may be derived from, for example, the nopaline synthase or octopine synthase genes, or alternatively from another plant gene, or less preferably from any other eukaryotic gene.

### Modulation

[0088] The term “modulation” means in relation to expression or gene expression, a process in which the expression level is changed by said gene expression in comparison to the control plant, the expression level may be increased or decreased. The original, unmodulated expression may be of any kind of expression of a structural RNA (rRNA, tRNA) or mRNA with subsequent translation. The term “modulating the activity” shall mean any change of the expression of the inventive nucleic acid sequences or encoded proteins, which leads to increased yield and/or increased growth of the plants.

### Expression

[0089] The term “expression” or “gene expression” means the transcription of a specific gene or specific genes or specific genetic construct. The term “expression” or “gene expression” in particular means the transcription of a gene or genes or genetic construct into structural RNA (rRNA, tRNA) or mRNA with or without subsequent translation of the latter into a protein. The process includes transcription of DNA and processing of the resulting mRNA product.

### Increased Expression/Overexpression

[0090] The term “increased expression” or “overexpression” as used herein means any form of expression that is additional to the original wild-type expression level.

[0091] Methods for increasing expression of genes or gene products are well documented in the art and include, for example, overexpression driven by appropriate promoters, the use of transcription enhancers or translation enhancers. Isolated nucleic acids which serve as promoter or enhancer elements may be introduced in an appropriate position (typically upstream) of a non-heterologous form of a polynucleotide so as to upregulate expression of a nucleic acid encoding the polypeptide of interest. For example, endogenous promoters may be altered in vivo by mutation, deletion, and/or substitution (see, Kmiec, U.S. Pat. No. 5,565,350; Zarling et al., WO9322443), or isolated promoters may be introduced into a plant cell in the proper orientation and distance from a gene of the present invention so as to control the expression of the gene.

[0092] If polypeptide expression is desired, it is generally desirable to include a polyadenylation region at the 3′-end of a polynucleotide coding region. The polyadenylation region can be derived from the natural gene, from a variety of other plant genes, or from T-DNA. The 3′ end sequence to be added may be derived from, for example, the nopaline synthase or octopine synthase genes, or alternatively from another plant gene, or less preferably from any other eukaryotic gene.

[0093] An intron sequence may also be added to the 5′ untranslated region (UTR) or the coding sequence of the partial coding sequence to increase the amount of the mature message that accumulates in the cytosol. Inclusion of a spliceable intron in the transcription unit in both plant and animal expression constructs has been shown to increase gene expression at both the mRNA and protein levels up to 1000-fold (Buchman and Berg (1988) Mol. Cell biol. 8: 4395-4405; Callis et al. (1987) Genes Dev 1:1183-1200). Such intron enhancement of gene expression is typically greatest when placed near the 5′ end of the transcription unit. Use of the maize introns Adh1-S intron 1, 2, and 6, the Bronze-1 intron are known in the art. For general information see: The Maize Handbook, Chapter 116, Freeling and Walbot, Eds., Springer, N.Y. (1994).

### Endogenous Gene

[0094] Reference herein to an “endogenous” gene not only refers to the gene in question as found in a plant in its natural form (i.e., without there being any human intervention), but also refers to that same gene (or a substantially homologous nucleic acid/gene) in an isolated form subsequently (re)introduced into a plant (a transgene). For example, a transgenic plant containing such a transgene may encounter a substantial reduction of the transgene expression and/or substantial reduction of expression of the endogenous gene. The isolated gene may be isolated from an organism or may be manmade, for example by chemical synthesis.

### Decreased Expression

[0095] Reference herein to “decreased expression” or “reduction or substantial elimination” of expression is taken to mean a decrease in endogenous gene expression and/or polypeptide levels and/or polypeptide activity relative to control plants. The reduction or substantial elimination is in increasing order of preference at least 10%, 20%, 30%, 40% or 50%, 60%, 70%, 80%, 85%, 90%, or 95%, 96%, 97%, 98%, 99% or more reduced compared to that of control plants. Methods for decreasing expression are known in the art and the skilled person would readily be able to adapt the known methods for silencing so as to achieve reduction of expression of an endogenous gene in a whole plant or in parts thereof through the use of an appropriate promoter, for example.

[0096] For the reduction or substantial elimination of expression an endogenous gene in a plant, a sufficient length of substantially contiguous nucleotides of a nucleic acid sequence is required. In order to perform gene silencing, this may be as little as 20, 19, 18, 17, 16, 15, 14, 13, 12, 11, 10 or fewer nucleotides, alternatively this may be as much as the entire gene (including the 5′ and/or 3′ UTR, either in part or in whole). The stretch of substantially contiguous nucleotides may be derived from the nucleic acid encoding the protein of interest (target gene), or from any nucleic acid capable of encoding an orthologue, paralogue or homologue of the protein of interest. Preferably, the stretch of substantially contiguous nucleotides is capable of forming hydrogen bonds with the target gene (either sense or antisense strand), more preferably, the stretch of substantially contiguous nucleotides has, in increasing order of preference, 50%, 60%, 70%, 80%, 85%, 90%, 95%, 96%, 97%, 98%, 99%, 100% sequence identity to the target gene (either sense or antisense strand). A nucleic acid sequence encoding a (functional) polypeptide is not a requirement for the various methods discussed herein for the reduction or substantial elimination of expression of an endogenous gene.

[0097] Examples of various methods for the reduction or substantial elimination of expression in a plant of an endogenous gene, or for lowering levels and/or activity of a protein, are known to the skilled in the art. A skilled person would readily be able to adapt the known methods for silencing, so as to achieve reduction of expression of an endogenous gene in a whole plant or in parts thereof through the use of an appropriate promoter, for example.

[0098] This reduction or substantial elimination of expression may be achieved using routine tools and techniques. A preferred method for the reduction or substantial elimination of endogenous gene expression is by introducing and expressing in a plant a genetic construct into which the nucleic acid (in this case a stretch of substantially contiguous nucleotides derived from the gene of interest, or from any nucleic acid capable of encoding an orthologue, paralogue or homologue of any one of the protein of interest) is cloned as an inverted repeat (in part or completely), separated by a spacer (non-coding DNA).

[0099] In such a preferred method, expression of the endogenous gene is reduced or substantially eliminated through RNA-mediated silencing using an inverted repeat of a nucleic acid or a part thereof (in this case a stretch of substantially contiguous nucleotides derived from the gene of interest, or from any nucleic acid capable of encoding an orthologue, paralogue or homologue of the protein of interest), preferably capable of forming a hairpin structure. The inverted repeat is cloned in an expression vector comprising control sequences. A non-coding DNA nucleic acid sequence (a spacer, for example a matrix attachment region fragment (MAR), an intron, a polylinker, etc.) is located between the two inverted nucleic acids forming the inverted repeat. After transcription of the inverted repeat, a chimeric RNA with a self-complementary structure is formed (partial or complete). This double-stranded RNA structure is referred to as the hairpin RNA (hpRNA). The hpRNA is processed by the plant into siRNAs that are incorporated into an RNA-induced silencing complex (RISC). The RISC further cleaves the mRNA transcripts, thereby substantially reducing the number of mRNA transcripts to be translated into polypeptides. For further general details see for example, Grierson et al. (1998) WO 98/53083; Waterhouse et al. (1999) WO 99/53050).

[0100] Performance of the methods of the invention does not rely on introducing and expressing in a plant a genetic construct into which the nucleic acid is cloned as an inverted repeat, but any one or more of several well-known “gene silencing” methods may be used to achieve the same effects.

[0101] One such method for the reduction of endogenous gene expression is RNA-mediated silencing of gene expression (downregulation). Silencing in this case is triggered in a plant by a double stranded RNA sequence (dsRNA) that is substantially similar to the target endogenous gene. This dsRNA is further processed by the plant into about 20 to about 26 nucleotides called short interfering RNAs (siRNAs). The siRNAs are incorporated into an RNA-induced silencing complex (RISC) that cleaves the mRNA transcript of the endogenous target gene, thereby substantially reducing the number of mRNA transcripts to be translated into a polypeptide. Preferably, the double stranded RNA sequence corresponds to a target gene.

[0102] Another example of an RNA silencing method involves the introduction of nucleic acid sequences or parts thereof (in this case a stretch of substantially contiguous nucleotides derived from the gene of interest, or from any nucleic acid capable of encoding an orthologue, paralogue or homologue of the protein of interest) in a sense orientation into a plant. “Sense orientation” refers to a DNA sequence that is homologous to an mRNA transcript thereof. Introduced into a plant would therefore be at least one copy of the nucleic acid sequence. The additional nucleic acid sequence will reduce expression of the endogenous gene, giving rise to a phenomenon known as co-suppression. The reduction of gene expression will be more pronounced if several additional copies of a nucleic acid sequence are introduced into the plant, as there is a positive correlation between high transcript levels and the triggering of co-suppression.

[0103] Another example of an RNA silencing method involves the use of antisense nucleic acid sequences. An “antisense” nucleic acid sequence comprises a nucleotide sequence that is complementary to a “sense” nucleic acid sequence encoding a protein, i.e. complementary to the coding strand of a double-stranded cDNA molecule or complementary to an mRNA transcript sequence. The antisense nucleic acid sequence is preferably complementary to the endogenous gene to be silenced. The complementarity may be located in the “coding region” and/or in the “non-coding region” of a gene. The term “coding region” refers to a region of the nucleotide sequence comprising codons that are translated into amino acid residues. The term “non-coding region” refers to 5′ and 3′ sequences that flank the coding region that are transcribed but not translated into amino acids (also referred to as 5′ and 3′ untranslated regions).

[0104] Antisense nucleic acid sequences can be designed according to the rules of Watson and Crick base pairing. The antisense nucleic acid sequence may be complementary to the entire nucleic acid sequence (in this case a stretch of substantially contiguous nucleotides derived from the gene of interest, or from any nucleic acid capable of encoding an orthologue, paralogue or homologue of the protein of interest), but may also be an oligonucleotide that is antisense to only a part of the nucleic acid sequence (including the mRNA 5′ and 3′ UTR). For example, the antisense oligonucleotide sequence may be complementary to the region surrounding the translation start site of an mRNA transcript encoding a polypeptide. The length of a suitable antisense oligonucleotide sequence is known in the art and may start from about 50, 45, 40, 35, 30, 25, 20, 15 or 10 nucleotides in length or less. An antisense nucleic acid sequence according to the invention may be constructed using chemical synthesis and enzymatic ligation reactions using methods known in the art. For example, an antisense nucleic acid sequence (e.g., an antisense oligonucleotide sequence) may be chemically synthesized using naturally occurring nucleotides or variously modified nucleotides designed to increase the biological stability of the molecules or to increase the physical stability of the duplex formed between the antisense and sense nucleic acid sequences, e.g., phosphorothioate derivatives and acridine substituted nucleotides may be used. Examples of modified nucleotides that may be used to generate the antisense nucleic acid sequences are well known in the art. Known nucleotide modifications include methylation, cyclization and ‘caps’ and substitution of one or more of the naturally occurring nucleotides with an analogue such as inosine. Other modifications of nucleotides are well known in the art.

[0105] The antisense nucleic acid sequence can be produced biologically using an expression vector into which a nucleic acid sequence has been subcloned in an antisense orientation (i.e., RNA transcribed from the inserted nucleic acid will be of an antisense orientation to a target nucleic acid of interest). Preferably, production of antisense nucleic acid sequences in plants occurs by means of a stably integrated nucleic acid construct comprising a promoter, an operably linked antisense oligonucleotide, and a terminator.

[0106] The nucleic acid molecules used for silencing in the methods of the invention (whether introduced into a plant or generated in situ) hybridize with or bind to mRNA transcripts and/or genomic DNA encoding a polypeptide to thereby inhibit expression of the protein, e.g., by inhibiting transcription and/or translation. The hybridization can be by conventional nucleotide complementarity to form a stable duplex, or, for example, in the case of an antisense nucleic acid sequence which binds to DNA duplexes, through specific interactions in the major groove of the double helix. Antisense nucleic acid sequences may be introduced into a plant by transformation or direct injection at a specific tissue site. Alternatively, antisense nucleic acid sequences can be modified to target selected cells and then administered systemically. For example, for systemic administration, antisense nucleic acid sequences can be modified such that they specifically bind to receptors or antigens expressed on a selected cell surface, e.g., by linking the antisense nucleic acid sequence to peptides or antibodies which bind to cell surface receptors or antigens. The antisense nucleic acid sequences can also be delivered to cells using the vectors described herein.

[0107] According to a further aspect, the antisense nucleic acid sequence is an a-anomeric nucleic acid sequence. An a-anomeric nucleic acid sequence forms specific double-stranded hybrids with complementary RNA in which, contrary to the usual b-units, the strands run parallel to each other (Gaultier et al. (1987) Nucl Ac Res 15: 6625-6641). The antisense nucleic acid sequence may also comprise a 2′-o-methylribonucleotide (Inoue et al. (1987) Nucl Ac Res 15, 6131-6148) or a chimeric RNA-DNA analogue (Inoue et al. (1987) FEBS Lett. 215, 327-330).

[0108] The reduction or substantial elimination of endogenous gene expression may also be performed using ribozymes. Ribozymes are catalytic RNA molecules with ribonuclease activity that are capable of cleaving a single-stranded nucleic acid sequence, such as an mRNA, to which they have a complementary region. Thus, ribozymes (e.g., hammerhead ribozymes (described in Haselhoff and Gerlach (1988) Nature 334, 585-591) can be used to catalytically cleave mRNA transcripts encoding a polypeptide, thereby substantially reducing the number of mRNA transcripts to be translated into a polypeptide. A ribozyme having specificity for a nucleic acid sequence can be designed (see for example: Cech et al. U.S. Pat. No. 4,987,071; and Cech et al. U.S. Pat. No. 5,116,742). Alternatively, mRNA transcripts corresponding to a nucleic acid sequence can be used to select a catalytic RNA having a specific ribonuclease activity from a pool of RNA molecules (Bartel and Szostak (1993) Science 261, 1411-1418). The use of ribozymes for gene silencing in plants is known in the art (e.g., Atkins et al. (1994) WO 94/00012; Lenne et al. (1995) WO 95/03404; Lutziger et al. (2000) WO 00/00619; Prinsen et al. (1997) WO 97/13865 and Scott et al. (1997) WO 97/38116).

[0109] Gene silencing may also be achieved by insertion mutagenesis (for example, T-DNA insertion or transposon insertion) or by strategies as described by, among others, Angell and Baulcombe ((1999) Plant J 20(3): 357-62), (Amplicon VIGS WO 98/36083), or Baulcombe (WO 99/15682).

[0110] Gene silencing may also occur if there is a mutation on an endogenous gene and/or a mutation on an isolated gene/nucleic acid subsequently introduced into a plant. The reduction or substantial elimination may be caused by a non-functional polypeptide. For example, the polypeptide may bind to various interacting proteins; one or more mutation(s) and/or truncation(s) may therefore provide for a polypeptide that is still able to bind interacting proteins (such as receptor proteins) but that cannot exhibit its normal function (such as signalling ligand).

[0111] A further approach to gene silencing is by targeting nucleic acid sequences complementary to the regulatory region of the gene (e.g., the promoter and/or enhancers) to form triple helical structures that prevent transcription of the gene in target cells. See Helene, C., Anticancer Drug Res. 6, 569-84, 1991; Helene et al., Ann. N.Y. Acad. Sci. 660, 27-36 1992; and Maher, L. J. Bioassays 14, 807-15, 1992.

[0112] Other methods, such as the use of antibodies directed to an endogenous polypeptide for inhibiting its function in planta, or interference in the signalling pathway in which a polypeptide is involved, will be well known to the skilled man. In particular, it can be envisaged that manmade molecules may be useful for inhibiting the biological function of a target polypeptide, or for interfering with the signalling pathway in which the target polypeptide is involved.

[0113] Alternatively, a screening program may be set up to identify in a plant population natural variants of a gene, which variants encode polypeptides with reduced activity. Such natural variants may also be used for example, to perform homologous recombination.

[0114] Artificial and/or natural microRNAs (miRNAs) may be used to knock out gene expression and/or mRNA translation. Endogenous miRNAs are single stranded small RNAs of typically 19-24 nucleotides long. They function primarily to regulate gene expression and/or mRNA translation. Most plant microRNAs (miRNAs) have perfect or near-perfect complementarity with their target sequences. However, there are natural targets with up to five mismatches. They are processed from longer non-coding RNAs with characteristic fold-back structures by double-strand specific RNases of the Dicer family. Upon processing, they are incorporated in the RNA-induced silencing complex (RISC) by binding to its main component, an Argonaute protein. MiRNAs serve as the specificity components of RISC, since they base-pair to target nucleic acids, mostly mRNAs, in the cytoplasm. Subsequent regulatory events include target mRNA cleavage and destruction and/or translational inhibition. Effects of miRNA overexpression are thus often reflected in decreased mRNA levels of target genes.

[0115] Artificial microRNAs (amiRNAs), which are typically 21 nucleotides in length, can be genetically engineered specifically to negatively regulate gene expression of single or multiple genes of interest. Determinants of plant microRNA target selection are well known in the art. Empirical parameters for target recognition have been defined and can be used to aid in the design of specific amiRNAs, (Schwab et al., Dev. Cell 8, 517-527, 2005). Convenient tools for design and generation of amiRNAs and their precursors are also available to the public (Schwab et al., Plant Cell 18, 1121-1133, 2006).

[0116] For optimal performance, the gene silencing techniques used for reducing expression in a plant of an endogenous gene requires the use of nucleic acid sequences from monocotyledonous plants for transformation of monocotyledonous plants, and from dicotyledonous plants for transformation of dicotyledonous plants. Preferably, a nucleic acid sequence from any given plant species is introduced into that same species. For example, a nucleic acid sequence from rice is transformed into a rice plant. However, it is not an absolute requirement that the nucleic acid sequence to be introduced originates from the same plant species as the plant in which it will be introduced. It is sufficient that there is substantial homology between the endogenous target gene and the nucleic acid to be introduced.

[0117] Described above are examples of various methods for the reduction or substantial elimination of expression in a plant of an endogenous gene. A person skilled in the art would readily be able to adapt the aforementioned methods for silencing so as to achieve reduction of expression of an endogenous gene in a whole plant or in parts thereof through the use of an appropriate promoter, for example.

### Selectable Marker (Gene)/Reporter Gene

[0118] “Selectable marker”, “selectable marker gene” or “reporter gene” includes any gene that confers a phenotype on a cell in which it is expressed to facilitate the identification and/or selection of cells that are transfected or transformed with a nucleic acid construct of the invention. These marker genes enable the identification of a successful transfer of the nucleic acid molecules via a series of different principles. Suitable markers may be selected from markers that confer antibiotic or herbicide resistance, that introduce a new metabolic trait or that allow visual selection. Examples of selectable marker genes include genes conferring resistance to antibiotics (such as nptII that phosphorylates neomycin and kanamycin, or hpt, phosphorylating hygromycin, or genes conferring resistance to, for example, bleomycin, streptomycin, tetracyclin, chloramphenicol, ampicillin, gentamycin, geneticin (G418), spectinomycin or blasticidin), to herbicides (for example bar which provides resistance to Basta®; aroA or gox providing resistance against glyphosate, or the genes conferring resistance to, for example, imidazolinone, phosphinothricin or sulfonylurea), or genes that provide a metabolic trait (such as manA that allows plants to use mannose as sole carbon source or xylose isomerase for the utilisation of xylose, or antinutritive markers such as the resistance to 2-deoxyglucose). Expression of visual marker genes results in the formation of colour (for example β-glucuronidase, GUS or 3-galactosidase with its coloured substrates, for example X-Gal), luminescence (such as the luciferin/luceferase system) or fluorescence (Green Fluorescent Protein, GFP, and derivatives thereof). This list represents only a small number of possible markers. The skilled worker is familiar with such markers. Different markers are preferred, depending on the organism and the selection method.

[0119] It is known that upon stable or transient integration of nucleic acids into plant cells, only a minority of the cells takes up the foreign DNA and, if desired, integrates it into its genome, depending on the expression vector used and the transfection technique used. To identify and select these integrants, a gene coding for a selectable marker (such as the ones described above) is usually introduced into the host cells together with the gene of interest. These markers can for example be used in mutants in which these genes are not functional by, for example, deletion by conventional methods. Furthermore, nucleic acid molecules encoding a selectable marker can be introduced into a host cell on the same vector that comprises the sequence encoding the polypeptides of the invention or used in the methods of the invention, or else in a separate vector. Cells which have been stably transfected with the introduced nucleic acid can be identified for example by selection (for example, cells which have integrated the selectable marker survive whereas the other cells die). The marker genes may be removed or excised from the transgenic cell once they are no longer needed. Techniques for marker gene removal are known in the art, useful techniques are described above in the definitions section.

[0120] Since the marker genes, particularly genes for resistance to antibiotics and herbicides, are no longer required or are undesired in the transgenic host cell once the nucleic acids have been introduced successfully, the process according to the invention for introducing the nucleic acids advantageously employs techniques which enable the removal or excision of these marker genes. One such a method is what is known as co-transformation. The co-transformation method employs two vectors simultaneously for the transformation, one vector bearing the nucleic acid according to the invention and a second bearing the marker gene(s). A large proportion of transformants receives or, in the case of plants, comprises (up to 40% or more of the transformants), both vectors. In case of transformation with Agrobacteria, the transformants usually receive only a part of the vector, i.e. the sequence flanked by the T-DNA, which usually represents the expression cassette. The marker genes can subsequently be removed from the transformed plant by performing crosses. In another method, marker genes integrated into a transposon are used for the transformation together with desired nucleic acid (known as the Ac/Ds technology). The transformants can be crossed with a transposase source or the transformants are transformed with a nucleic acid construct conferring expression of a transposase, transiently or stable. In some cases (approx. 10%), the transposon jumps out of the genome of the host cell once transformation has taken place successfully and is lost. In a further number of cases, the transposon jumps to a different location. In these cases the marker gene must be eliminated by performing crosses. In microbiology, techniques were developed which make possible, or facilitate, the detection of such events. A further advantageous method relies on what is known as recombination systems; whose advantage is that elimination by crossing can be dispensed with. The best-known system of this type is what is known as the Cre/lox system. Cre1 is a recombinase that removes the sequences located between the loxP sequences. If the marker gene is integrated between the loxP sequences, it is removed once transformation has taken place successfully, by expression of the recombinase. Further recombination systems are the HIN/HIX, FLP/FRT and REP/STB system (Tribble et al., J. Biol. Chem., 275, 2000: 22255-22267; Velmurugan et al., J. Cell Biol., 149, 2000: 553-566). A site-specific integration into the plant genome of the nucleic acid sequences according to the invention is possible. Naturally, these methods can also be applied to microorganisms such as yeast, fungi or bacteria.

### Transgenic/Transgene/Recombinant

[0121] For the purposes of the invention, “transgenic”, “transgene” or “recombinant” means with regard to, for example, a nucleic acid sequence, an expression cassette, gene construct or a vector comprising the nucleic acid sequence or an organism transformed with the nucleic acid sequences, expression cassettes or vectors according to the invention, all those constructions brought about by recombinant methods in which either
[0122] (a) the nucleic acid sequences encoding proteins useful in the methods of the invention, or
[0123] (b) genetic control sequence(s) which is operably linked with the nucleic acid sequence according to the invention, for example a promoter, or
[0124] (c) a) and b)
   are not located in their natural genetic environment or have been modified by recombinant methods, it being possible for the modification to take the form of, for example, a substitution, addition, deletion, inversion or insertion of one or more nucleotide residues. The natural genetic environment is understood as meaning the natural genomic or chromosomal locus in the original plant or the presence in a genomic library. In the case of a genomic library, the natural genetic environment of the nucleic acid sequence is preferably retained, at least in part. The environment flanks the nucleic acid sequence at least on one side and has a sequence length of at least 50 bp, preferably at least 500 bp, especially preferably at least 1000 bp, most preferably at least 5000 bp. A naturally occurring expression cassette—for example the naturally occurring combination of the natural promoter of the nucleic acid sequences with the corresponding nucleic acid sequence encoding a polypeptide useful in the methods of the present invention, as defined above—becomes a transgenic expression cassette when this expression cassette is modified by non-natural, synthetic (“artificial”) methods such as, for example, mutagenic treatment. Suitable methods are described, for example, in U.S. Pat. No. 5,565,350 or WO 00/15815.

[0125] A transgenic plant for the purposes of the invention is thus understood as meaning, as above, that the nucleic acids used in the method of the invention are not at their natural locus in the genome of said plant, it being possible for the nucleic acids to be expressed homologously or heterologously. However, as mentioned, transgenic also means that, while the nucleic acids according to the invention or used in the inventive method are at their natural position in the genome of a plant, the sequence has been modified with regard to the natural sequence, and/or that the regulatory sequences of the natural sequences have been modified. Transgenic is preferably understood as meaning the expression of the nucleic acids according to the invention at an unnatural locus in the genome, i.e. homologous or, preferably, heterologous expression of the nucleic acids takes place. Preferred transgenic plants are mentioned herein.

### Transformation

[0126] The term “introduction” or “transformation” as referred to herein encompasses the transfer of an exogenous polynucleotide into a host cell, irrespective of the method used for transfer. Plant tissue capable of subsequent clonal propagation, whether by organogenesis or embryogenesis, may be transformed with a genetic construct of the present invention and a whole plant regenerated there from. The particular tissue chosen will vary depending on the clonal propagation systems available for, and best suited to, the particular species being transformed. Exemplary tissue targets include leaf disks, pollen, embryos, cotyledons, hypocotyls, megagametophytes, callus tissue, existing meristematic tissue (e.g., apical meristem, axillary buds, and root meristems), and induced meristem tissue (e.g., cotyledon meristem and hypocotyl meristem). The polynucleotide may be transiently or stably introduced into a host cell and may be maintained non-integrated, for example, as a plasmid. Alternatively, it may be integrated into the host genome. The resulting transformed plant cell may then be used to regenerate a transformed plant in a manner known to persons skilled in the art.

[0127] The transfer of foreign genes into the genome of a plant is called transformation. Transformation of plant species is now a fairly routine technique. Advantageously, any of several transformation methods may be used to introduce the gene of interest into a suitable ancestor cell. The methods described for the transformation and regeneration of plants from plant tissues or plant cells may be utilized for transient or for stable transformation. Transformation methods include the use of liposomes, electroporation, chemicals that increase free DNA uptake, injection of the DNA directly into the plant, particle gun bombardment, transformation using viruses or pollen and microprojection. Methods may be selected from the calcium/polyethylene glycol method for protoplasts (Krens, F. A. et al., (1982) Nature 296, 72-74; Negrutiu I et al. (1987) Plant Mol Biol 8: 363-373); electroporation of protoplasts (Shillito R. D. et al. (1985) Bio/Technol 3, 1099-1102); microinjection into plant material (Crossway A et al., (1986) Mol. Gen. Genet 202: 179-185); DNA or RNA-coated particle bombardment (Klein T M et al., (1987) Nature 327: 70) infection with (non-integrative) viruses and the like. Transgenic plants, including transgenic crop plants, are preferably produced via Agrobacterium-mediated transformation. An advantageous transformation method is the transformation in planta. To this end, it is possible, for example, to allow the agrobacteria to act on plant seeds or to inoculate the plant meristem with agrobacteria. It has proved particularly expedient in accordance with the invention to allow a suspension of transformed agrobacteria to act on the intact plant or at least on the flower primordia. The plant is subsequently grown on until the seeds of the treated plant are obtained (Clough and Bent, Plant J. (1998) 16, 735-743). Methods for Agrobacterium-mediated transformation of rice include well known methods for rice transformation, such as those described in any of the following: European patent application EP 1198985 A1, Aldemita and Hodges (Planta 199: 612-617, 1996); Chan et al. (Plant Mol Biol 22 (3): 491-506, 1993), Hiei et al. (Plant J 6 (2): 271-282, 1994), which disclosures are incorporated by reference herein as if fully set forth. In the case of corn transformation, the preferred method is as described in either Ishida et al. (Nat. Biotechnol 14(6): 745-50, 1996) or Frame et al. (Plant Physiol 129(1): 13-22, 2002), which disclosures are incorporated by reference herein as if fully set forth. Said methods are further described by way of example in B. Jenes et al., Techniques for Gene Transfer, in: Transgenic Plants, Vol. 1, Engineering and Utilization, eds. S. D. Kung and R. Wu, Academic Press (1993) 128-143 and in Potrykus Annu. Rev. Plant Physiol. Plant Molec. Biol. 42 (1991) 205-225). The nucleic acids or the construct to be expressed is preferably cloned into a vector, which is suitable for transforming Agrobacterium tumefaciens, for example pBin19 (Bevan et al., Nucl. Acids Res. 12 (1984) 8711). Agrobacteria transformed by such a vector can then be used in known manner for the transformation of plants, such as plants used as a model, like Arabidopsis (Arabidopsis thaliana is within the scope of the present invention not considered as a crop plant), or crop plants such as, by way of example, tobacco plants, for example by immersing bruised leaves or chopped leaves in an agrobacterial solution and then culturing them in suitable media. The transformation of plants by means of Agrobacterium tumefaciens is described, for example, by Hofgen and Willmitzer in Nucl. Acid Res. (1988) 16, 9877 or is known inter alia from F. F. White, Vectors for Gene Transfer in Higher Plants; in Transgenic Plants, Vol. 1, Engineering and Utilization, eds. S. D. Kung and R. Wu, Academic Press, 1993, pp. 15-38.

[0128] In addition to the transformation of somatic cells, which then have to be regenerated into intact plants, it is also possible to transform the cells of plant meristems and in particular those cells which develop into gametes. In this case, the transformed gametes follow the natural plant development, giving rise to transgenic plants. Thus, for example, seeds of Arabidopsis are treated with agrobacteria and seeds are obtained from the developing plants of which a certain proportion is transformed and thus transgenic [Feldman, K A and Marks M D (1987). Mol Gen Genet 208:274-289; Feldmann K (1992). In: C Koncz, N-H Chua and J Shell, eds, Methods in Arabidopsis Research. Word Scientific, Singapore, pp. 274-289]. Alternative methods are based on the repeated removal of the inflorescences and incubation of the excision site in the center of the rosette with transformed agrobacteria, whereby transformed seeds can likewise be obtained at a later point in time (Chang (1994). Plant J. 5: 551-558; Katavic (1994). Mol Gen Genet, 245: 363-370). However, an especially effective method is the vacuum infiltration method with its modifications such as the “floral dip” method. In the case of vacuum infiltration of Arabidopsis, intact plants under reduced pressure are treated with an agrobacterial suspension [Bechthold, N (1993). C R Acad Sci Paris Life Sci, 316: 1194-1199], while in the case of the “floral dip” method the developing floral tissue is incubated briefly with a surfactant-treated agrobacterial suspension [Clough, S J and Bent A F (1998) The Plant J. 16, 735-743]. A certain proportion of transgenic seeds are harvested in both cases, and these seeds can be distinguished from non-transgenic seeds by growing under the above-described selective conditions. In addition the stable transformation of plastids is of advantages because plastids are inherited maternally is most crops reducing or eliminating the risk of transgene flow through pollen. The transformation of the chloroplast genome is generally achieved by a process which has been schematically displayed in Klaus et al., 2004 [Nature Biotechnology 22 (2), 225-229]. Briefly the sequences to be transformed are cloned together with a selectable marker gene between flanking sequences homologous to the chloroplast genome. These homologous flanking sequences direct site specific integration into the plastome. Plastidal transformation has been described for many different plant species and an overview is given in Bock (2001) Transgenic plastids in basic research and plant biotechnology. J Mol Biol. 2001 Sep. 21; 312 (3):425-38 or Maliga, P (2003) Progress towards commercialization of plastid transformation technology. Trends Biotechnol. 21, 20-28. Further biotechnological progress has recently been reported in form of marker free plastid transformants, which can be produced by a transient co-integrated maker gene (Klaus et al., 2004, Nature Biotechnology 22(2), 225-229).

### T-DNA Activation Tagging

[0129] T-DNA activation tagging (Hayashi et al. Science (1992) 1350-1353), involves insertion of T-DNA, usually containing a promoter (may also be a translation enhancer or an intron), in the genomic region of the gene of interest or 10 kb up- or downstream of the coding region of a gene in a configuration such that the promoter directs expression of the targeted gene. Typically, regulation of expression of the targeted gene by its natural promoter is disrupted and the gene falls under the control of the newly introduced promoter. The promoter is typically embedded in a T-DNA. This T-DNA is randomly inserted into the plant genome, for example, through Agrobacterium infection and leads to modified expression of genes near the inserted T-DNA. The resulting transgenic plants show dominant phenotypes due to modified expression of genes close to the introduced promoter.

### TILLING

[0130] The term “TILLING” is an abbreviation of “Targeted Induced Local Lesions In Genomes” and refers to a mutagenesis technology useful to generate and/or identify nucleic acids encoding proteins with modified expression and/or activity. TILLING also allows selection of plants carrying such mutant variants. These mutant variants may exhibit modified expression, either in strength or in location or in timing (if the mutations affect the promoter for example). These mutant variants may exhibit higher activity than that exhibited by the gene in its natural form. TILLING combines high-density mutagenesis with high-throughput screening methods. The steps typically followed in TILLING are: (a) EMS mutagenesis (Redei G P and Koncz C (1992) In Methods in Arabidopsis Research, Koncz C, Chua N H, Schell J, eds. Singapore, World Scientific Publishing Co, pp. 16-82; Feldmann et al., (1994) In Meyerowitz E M, Somerville C R, eds, Arabidopsis. Cold Spring Harbor Laboratory Press, Cold Spring Harbor, N.Y., pp 137-172; Lightner J and Caspar T (1998) In J Martinez-Zapater, J Salinas, eds, Methods on Molecular Biology, Vol. 82. Humana Press, Totowa, N.J., pp 91-104); (b) DNA preparation and pooling of individuals; (c) PCR amplification of a region of interest; (d) denaturation and annealing to allow formation of heteroduplexes; (e) DHPLC, where the presence of a heteroduplex in a pool is detected as an extra peak in the chromatogram; (f) identification of the mutant individual; and (g) sequencing of the mutant PCR product. Methods for TILLING are well known in the art (McCallum et al., (2000) Nat Biotechnol 18: 455-457; reviewed by Stemple (2004) Nat Rev Genet 5(2): 145-50).

### Homologous Recombination

[0131] Homologous recombination allows introduction in a genome of a selected nucleic acid at a defined selected position. Homologous recombination is a standard technology used routinely in biological sciences for lower organisms such as yeast or the moss Physcomitrella. Methods for performing homologous recombination in plants have been described not only for model plants (Offring a et al. (1990) EMBO J 9(10): 3077-84) but also for crop plants, for example rice (Terada et al. (2002) Nat Biotech 20(10): 1030-4; lida and Terada (2004) Curr Opin Biotech 15(2): 132-8), and approaches exist that are generally applicable regardless of the target organism (Miller et al, Nature Biotechnol. 25, 778-785, 2007).

### Yield

[0132] The term “yield” in general means a measurable produce of economic value, typically related to a specified crop, to an area, and to a period of time. Individual plant parts directly contribute to yield based on their number, size and/or weight, or the actual yield is the yield per square meter for a crop and year, which is determined by dividing total production (includes both harvested and appraised production) by planted square meters. The term “yield” of a plant may relate to vegetative biomass (root and/or shoot biomass), to reproductive organs, and/or to propagules (such as seeds) of that plant.

### Early Vigour

[0133] “Early vigour” refers to active healthy well-balanced growth especially during early stages of plant growth, and may result from increased plant fitness due to, for example, the plants being better adapted to their environment (i.e. optimizing the use of energy resources and partitioning between shoot and root). Plants having early vigour also show increased seedling survival and a better establishment of the crop, which often results in highly uniform fields (with the crop growing in uniform manner, i.e. with the majority of plants reaching the various stages of development at substantially the same time), and often better and higher yield. Therefore, early vigour may be determined by measuring various factors, such as thousand kernel weight, percentage germination, percentage emergence, seedling growth, seedling height, root length, root and shoot biomass and many more.

### Increase/Improve/Enhance

[0134] The terms “increase”, “improve” or “enhance” are interchangeable and shall mean in the sense of the application at least a 3%, 4%, 5%, 6%, 7%, 8%, 9% or 10%, preferably at least 15% or 20%, more preferably 25%, 30%, 35% or 40% more yield and/or growth in comparison to control plants as defined herein.

### Seed Yield

[0135] Increased seed yield may manifest itself as one or more of the following: a) an increase in seed biomass (total seed weight) which may be on an individual seed basis and/or per plant and/or per square meter; b) increased number of flowers per plant; c) increased number of (filled) seeds; d) increased seed filling rate (which is expressed as the ratio between the number of filled seeds divided by the total number of seeds); e) increased harvest index, which is expressed as a ratio of the yield of harvestable parts, such as seeds, divided by the total biomass; and f) increased thousand kernel weight (TKW), and g) increased number of primary panicles, which is extrapolated from the number of filled seeds counted and their total weight. An increased TKW may result from an increased seed size and/or seed weight, and may also result from an increase in embryo and/or endosperm size.

[0136] An increase in seed yield may also be manifested as an increase in seed size and/or seed volume. Furthermore, an increase in seed yield may also manifest itself as an increase in seed area and/or seed length and/or seed width and/or seed perimeter. Increased seed yield may also result in modified architecture, or may occur because of modified architecture.

### Greenness Index

[0137] The “greenness index” as used herein is calculated from digital images of plants. For each pixel belonging to the plant object on the image, the ratio of the green value versus the red value (in the RGB model for encoding color) is calculated. The greenness index is expressed as the percentage of pixels for which the green-to-red ratio exceeds a given threshold. Under normal growth conditions, under salt stress growth conditions, and under reduced nutrient availability growth conditions, the greenness index of plants is measured in the last imaging before flowering. In contrast, under drought stress growth conditions, the greenness index of plants is measured in the first imaging after drought.

### Plant

[0138] The term “plant” as used herein encompasses whole plants, ancestors and progeny of the plants and plant parts, including seeds, shoots, stems, leaves, roots (including tubers), flowers, and tissues and organs, wherein each of the aforementioned comprise the gene/nucleic acid of interest. The term “plant” also encompasses plant cells, suspension cultures, callus tissue, embryos, meristematic regions, gametophytes, sporophytes, pollen and microspores, again wherein each of the aforementioned comprises the gene/nucleic acid of interest.

[0139] Plants that are particularly useful in the methods of the invention include all plants which belong to the superfamily Viridiplantae, in particular monocotyledonous and dicotyledonous plants including fodder or forage legumes, ornamental plants, food crops, trees or shrubs selected from the list comprising Acer spp., Actinidia spp., Abelmoschus spp., Agave sisalana, Agropyron spp., Agrostis stolonifera, Allium spp., Amaranthus spp., Ammophila arenaria, Ananas comosus, Annona spp., Apium graveolens, Arachis spp, Artocarpus spp., Asparagus officinalis, Avena spp. (e.g. Avena sativa, Avena fatua, Avena byzantina, Avena fatua var. sativa, Avena hybrida), Averrhoa carambola, Bambusa sp., Benincasa hispida, Bertholletia excelsea, Beta vulgaris, Brassica spp. (e.g. Brassica napus, Brassica rapa ssp. [canola, oilseed rape, turnip rape]), Cadaba farinosa, Camellia sinensis, Canna indica, Cannabis sativa, Capsicum spp., Carex elata, Carica papaya, Carissa macrocarpa, Carya spp., Carthamus tinctorius, Castanea spp., Ceiba pentandra, Cichorium endivia, Cinnamomum spp., Citrullus lanatus, Citrus spp., Cocos spp., Coffea spp., Colocasia esculenta, Cola spp., Corchorus sp., Coriandrum sativum, Corylus spp., Crataegus spp., Crocus sativus, Cucurbita spp., Cucumis spp., Cynara spp., Daucus carota, Desmodium spp., Dimocarpus longan, Dioscorea spp., Diospyros spp., Echinochloa spp., Elaeis (e.g. Elaeis guineensis, Elaeis oleifera), Eleusine coracana, Eragrostis tef, Erianthus sp., Eriobotrya japonica, Eucalyptus sp., Eugenia uniflora, Fagopyrum spp., Fagus spp., Festuca arundinacea, Ficus carica, Fortunella spp., Fragaria spp., Ginkgo biloba, Glycine spp. (e.g. Glycine max, Soja hispida or Soja max), Gossypium hirsutum, Helianthus spp. (e.g. Helianthus annuus), Hemerocallis fulva, Hibiscus spp., Hordeum spp. (e.g. Hordeum vulgare), Ipomoea batatas, Juglans spp., Lactuca sativa, Lathyrus spp., Lens culinaris, Linum usitatissimum, Litchi chinensis, Lotus spp., Luffa acutangula, Lupinus spp., Luzula sylvatica, Lycopersicon spp. (e.g. Lycopersicon esculentum, Lycopersicon lycopersicum, Lycopersicon pyriforme), Macrotyloma spp., Malus spp., Malpighia emarginata, Mammea americana, Mangifera indica, Manihot spp., Manilkara zapota, Medicago sativa, Melilotus spp., Mentha spp., Miscanthus sinensis, Momordica spp., Morus nigra, Musa spp., Nicotiana spp., Olea spp., Opuntia spp., Ornithopus spp., Oryza spp. (e.g. Oryza sativa, Oryza latifolia), Panicum miliaceum, Panicum virgatum, Passiflora edulis, Pastinaca sativa, Pennisetum sp., Persea spp., Petroselinum crispum, Phalaris arundinacea, Phaseolus spp., Phleum pratense, Phoenix spp., Phragmites australis, Physalis spp., Pinus spp., Pistacia vera, Pisum spp., Poa spp., Populus spp., Prosopis spp., Prunus spp., Psidium spp., Punica granatum, Pyrus communis, Quercus spp., Raphanus sativus, Rheum rhabarbarum, Ribes spp., Ricinus communis, Rubus spp., Saccharum spp., Salix sp., Sambucus spp., Secale cereale, Sesamum spp., Sinapis sp., Solanum spp. (e.g. Solanum tuberosum, Solanum integrifolium or Solanum lycopersicum), Sorghum bicolor, Spinacia spp., Syzygium spp., Tagetes spp., Tamarindus indica, Theobroma cacao, Trifolium spp., Tripsacum dactyloides, Triticale sp., Triticosecale rimpaui, Triticum spp. (e.g. Triticum aestivum, Triticum durum, Triticum turgidum, Triticum hybernum, Triticum macha, Triticum sativum, Triticum monococcum or Triticum vulgare), Tropaeolum minus, Tropaeolum majus, Vaccinium spp., Vicia spp., Vigna spp., Viola odorata, Vitis spp., Zea mays, Zizania palustris, Ziziphus spp., amongst others.

### DETAILED DESCRIPTION OF THE INVENTION

[0140] Surprisingly, it has now been found that modulating expression in a plant of a nucleic acid sequence encoding an Ornithine Decarboxylase polypeptide gives plants having enhanced yield-related traits relative to control plants. According to an embodiment, the present invention provides a method for enhancing yield-related traits in plants relative to control plants, comprising modulating expression in a plant of a nucleic acid encoding an Ornithine Decarboxylase polypeptide.

[0141] Furthermore surprisingly, it has now been found that increasing expression in a plant of a nucleic acid sequence encoding a BIHD1 polypeptide as defined herein, gives plants having increased yield-related traits relative to control plants. According to another embodiment, the present invention provides a method for increasing yield-related traits in plants relative to control plants, comprising increasing expression in a plant of a nucleic acid sequence encoding a BIHD1 polypeptide.

[0142] Furthermore surprisingly, it has now been found that modulating expression in a plant of a nucleic acid encoding a MYB30 polypeptide gives plants having enhanced yield-related traits relative to control plants. According to a first embodiment, the present invention provides a method for enhancing yield-related traits in plants relative to control plants, comprising modulating expression in a plant of a nucleic acid encoding a MYB30 polypeptide.

[0143] Furthermore surprisingly, it has now been found that modulating expression in a plant of a nucleic acid encoding a THOM polypeptide gives plants having enhanced yield-related traits relative to control plants. According to a first embodiment, the present invention provides a method for enhancing yield-related traits in plants relative to control plants, comprising modulating expression in a plant of a nucleic acid encoding a THOM polypeptide.

[0144] Furthermore surprisingly, it has now been found that increasing expression in a plant of a nucleic acid sequence encoding a BIHD2 polypeptide as defined herein, gives plants having increased yield-related traits relative to control plants. According to a first embodiment, the present invention provides a method for increasing yield-related traits in plants relative to control plants, comprising increasing expression in a plant of a nucleic acid sequence encoding a BIHD2 polypeptide, and optionally selecting for plants having increased yield-related traits.

[0145] A preferred method for modulating (preferably, increasing) expression of a nucleic acid sequence encoding an ODC polypeptide, or a BIHD1 polypeptide, or a MYB30 polypeptide, or a THOM polypeptide, or a BIHD2 polypeptide is by introducing and expressing in a plant a nucleic acid sequence encoding an ODC polypeptide, or a BIHD1 polypeptide, or a MYB30 polypeptide, or a THOM polypeptide, or a BIHD2 polypeptide.

[0146] Concerning ODC polypeptides/genes, any reference hereinafter to a “protein useful in the methods of the invention” is taken to mean an Ornithine Decarboxylase polypeptide as defined herein. Any reference hereinafter to a “nucleic acid useful in the methods of the invention” is taken to mean a nucleic acid capable of encoding such an Ornithine Decarboxylase polypeptide. The nucleic acid to be introduced into a plant (and therefore useful in performing the methods of the invention) is any nucleic acid encoding the type of protein which will now be described, hereafter also named “Ornithine Decarboxylase nucleic acid” or “Ornithine Decarboxylase gene”.

[0147] An ODC polypeptide as referred to ein is able to act on L-Ornithine as substrate in a decarboxylation reaction and therefore catalyzes the reaction to produce putrescine from L-ornithine. Thus an Ornithine Decarboxylase polypeptide catalyses the following reaction: L-ornithine=putrescine+CO2. Ornithine (2,5-diaminopentanoic acid) is an amino acid having the chemical composition C5H12N2O2. Putrescine (sometimes spelled putrescin or putrescene) is an organic chemical compound having the chemical composition C4H12N2 (1,4-diaminobutane or butanediamine). FIG. 1 shows the L-Ornithine decarboxilation reaction.

[0148] Ornithine Decarboxylase polypeptides share similarity in the primary sequence and in the secondary structure. They belong to the beta/alpha barrel decarboxylase class of proteins. In a phylogenetic analysis of beta/alpha barrel decarboxylase, ODCs constitute a distinct clade of proteins.

[0149] Ornithine Decarboxylase polypeptides useful in the methods of the invention cluster when used in the construction of a Phylogenetic tree of alpha/beta-barrel fold basic amino acid decarboxylase polypeptides within the clade constituted by known Ornithine Decarboxylase rather than with Arginine Decarboxylase, Diaminopimelate Decarboxylase, or Carboxynorspermidine Decarboxylase polypeptides. Preferably an OCD useful in the methods of the invention clusters within the clade constituted by ODCs polypeptides of eukaryotic origin, further preferably cluster within the clade constituted by ODC polypeptides of plant origin, even more preferably cluster the clade constituted by ODC polypeptides of dicotyledoneous origin, most preferably cluster within the same clade as SEQ ID NO: 2. Examples of such Phylogenetic tree of alpha/beta-barrel fold basic amino acid decarboxylase polypeptides is given in FIG. 1 of Lee et al. 2007 and FIG. 2 B of the present application.

[0150] Methods for the inference of phylogeny are well known in the art and include “distance methods” based on a matrix containing pair wise distance values between all sequences in an alignment, and “character-based methods” that carry out calculations on each of the individual residues of the sequences. Examples of “distance methods” are the UPGMA (Unweighted Pair Group with Arithmetic Mean) and Neighbor-joining (Saitou and Nei, 1987). The latter method is used in well known sofware programs useful in performing protein phylogenesis such as Neighbor of the Phylip package (Jo Felsentein, Univ. Washington), or ClustalW (D. Higgins, EMBL). Examples of “character-based methods” are the Protein Maximum likelihood and Protein maximal parsimony. The skill person in the art is knowledgeable in the various available methods and is able to select advantageously the method of phylogeny analysis. A preferred method for the inference of phylogeny of ODCs polypeptides is the Neighbor-joining method.

[0151] A preferrred Ornitine Decarboxylase polypeptide useful in the methods of the invention comprise in increasing order of preference one or more of the following sequence motifs:

| | |
|---|---|
| (i) | Motif 1: |
| | (SEQ ID NO: 51) |
| | [N/G]AR[C/V]P[L/M][G/S][P/L]K[Y/F]GALPEE |
| | [V/A]EPLL[R/Q][A/T]A[Q/K][A/E][A/L][G/R] |
| | LTV[S/V]GVSFH[V/I]GSG; |
| (ii) | Motif 2: |
| | (SEQ ID NO: 52) |
| | [K/D][D/Q][P/A]FYV[L/V]DL[G/A][E/V]VV |
| | [S/R]LMDQW[R/K/N][A/S]; |
| (iii) | Motof 3: |
| | (SEQ ID NO: 53) |
| | RI[V/I][[F/Y]ANPCK[P/R]ES[D/H]I[I/K/R] |
| | [Y/F]AA[K/S]VGVNLTT[Y/F]DSEDE[V/L][Y/E]K |
| | [I/V][R/A/K]KHHP; |
| (iv) | Motif 4: |
| | (SEQ ID NO: 54) |
| | EY[W/Y]I[N/D]DG[L/V/I]YGS[F/M/L]NC[I/V]L |
| | [Y/F]DHAT; |
| (v) | Motif 5: |
| | (SEQ ID NO: 55) |
| | EYVLSLG[V/I]SPD; |
| (vi) | Motif 6: |
| | (SEQ ID NO: 56) |
| | AI[A/E]AA[K/R]EVF[E/D][T/A]A[A/S][K/Q/R] |
| | [L/F]G[M/L][P/S][K/R/P]M[T/R]VL[D/N] |
| | [I/V]GGGFT[S/A]G[H/P]QF[T/E][T/E]AA[A/V] |
| | [A/K/V][V/I][K/N][S/A]; |
| (vii) | Motif 7: |
| | (SEQ ID NO: 57) |
| | [G/I]G[G/A]AP[P/T/V]AAAA[A/E][EN][N/D/G] |
| | [G/H]TRKV[V/I]PLS[R/K]DALQDFM[V/L]SIITQK |
| | LQD[E/D]; |
| (viii) | Motif 8: |
| | (SEQ ID NO: 58) |
| | QT[V/I]IVSGLNPAAILQ; |

[0152] (ix) a motif having in increasing order of preference at least 50%, 55%, 60%, 65%, 70%, 75%, 80%, 85%, 90%, 95%, 96%, 97%, 98%, 99% or more sequence identity to any one of the motifs (i) to (viii).

[0153] ODC polypeptides comprise various well known conserved protein domains. Proteins sharing common conserved domains are regarded as performing same or related functions.

[0154] Methods to identify conserved domains are well known in the art and include the searching of specialized datatabases such as Interpro (Mulder et al., (2003) Nucl. Acids. Res. 31, 315-318), Prosite (Bucher and Bairoch (1994), and Pfam (Bateman et al., Nucleic Acids Research 30(1): 276-280 (2002)). Example 4 details the conserved domains found SEQ ID NO: 2 by screening Interpro database.

[0155] A further preferred ODC polypeptide useful in the methods of the invention comprises one or more of the following conserved sequences:
[0156] (i) A PFAM domain with accession number PF00278 also referred to as Pyridoxal-dependent decarboxylase, C-terminal sheet domain or Orn_DAP_Arg_deC;
[0157] (ii) A PFAM domain with accession number PF02784 also referred to as Pyridoxal-dependent decarboxylase, pyridoxal binding domain or Orn_Arg_deC_N;
[0158] (iii) A PROSITE pattern with accession number PS00878 also referred to as ODR_DC_{—}2_{—}1 or Orn/DAP/Arg decarboxylases family 2 pyridoxal-P attachment site having a consensus pattern as represented by [F/Y]-[P/A]-x-K-[S/A/C/V]-[N/H/C/L/F/W]-x(4)-[L/I/V/M/F]-[L/I/V/M/T/A]-x(2)-[L/I/V/M/A]-x(3)-[G/T/E] (SEQ ID NO: 64);
[0159] (iv) A PROSITE pattern accession number PS00879 also referred to as ODR_DC_{—}2_{—}2 or Orn/DAP/Arg decarboxylases family 2 signature 2, having a consensus pattern as represented by [G/S/A]-x(2,6)-[L/I/V/M/S/C/P]-x-N-[L/I/V/M/F]-[D/N/S]-[L/I/V/M/C/A]-G(3)-[L/I/V/M/F/Y]-[G/S/T/P/C/E/Q] (SEQ ID NO: 65);
[0160] (v) a motif having in increasing order of preference at least 50%, 55%, 60%, 65%, 70%, 75%, 80%, 85%, 90%, 95%, 96%, 97%, 98%, 99% or more sequence identity to any one of the motifs (i) to (iv).

[0161] An even further preferred ODC polypeptide useful in the methods of the invention comprises a domain having in increasing order of preference at least 50%, 55%, 60%, 65%, 70%, 75%, 80%, 85%, 90%, 95%, 96%, 97%, 98%, 99% or more sequence identity to the amino acid sequence of any of the domains as set forth in Table C1 of Example 4.

[0162] Examples of ODC polypeptides useful in the methods of the invention are given in Table A1 of Example 1 herein. Global sequence similarity and identity between selected polypeptides of Table A1 is given in Table B1 of Example 3.

[0163] Further preferably ODC polypeptides useful in the methods of the invention comprise a sequence having in increasing order of preference at least 30%, 35%, 40%, 45%, 50%, 55%, 60%, 65%, 70%, 75%, 80%, 85%, 90%, 95%, 96%, 97%, 98%, 99% or more sequence identity to the amino acid sequence of any of the polypeptides of Table A1. Further preferably is any of the polypeptides of Table A1. Most preferably is SEQ ID NO: 2.

[0164] Alternatively, the homologue of an ODC protein has in increasing order of preference at least 25%, 26%, 27%, 28%, 29%, 30%, 31%, 32%, 33%, 34%, 35%, 36%, 37%, 38%, 39%, 40%, 41%, 42%, 43%, 44%, 45%, 46%, 47%, 48%, 49%, 50%, 51%, 52%, 53%, 54%, 55%, 56%, 57%, 58%, 59%, 60%, 61%, 62%, 63%, 64%, 65%, 66%, 67%, 68%, 69%, 70%, 71%, 72%, 73%, 74%, 75%, 76%, 77%, 78%, 79%, 80%, 81%, 82%, 83%, 84%, 85%, 86%, 87%, 88%, 89%, 90%, 91%, 92%, 93%, 94%, 95%, 96%, 97%, 98%, or 99% overall sequence identity to the amino acid represented by SEQ ID NO: 2, provided that the homologous protein comprises the conserved motifs as outlined above. The overall sequence identity is determined using a global alignment algorithm, such as the Needleman Wunsch algorithm in the program GAP (GCG Wisconsin Package, Accelrys), preferably with default parameters. Compared to overall sequence identity, the sequence identity will generally be higher when only conserved domains or motifs are considered.

[0165] Preferably, the polypeptide sequence which when used in the construction of a phylogenetic tree, such as the one depicted in FIG. 2 B, clusters preferably with the group of ODC polypeptides, most preferably with the group comprising the amino acid sequence represented by SEQ ID NO: 2 rather than with any other group.

[0166] Concerning BIHD1 polypeptides/genes, any reference hereinafter to a “protein useful in the methods of the invention” is taken to mean a BIHD1 polypeptide as defined herein. Any reference hereinafter to a “nucleic acid sequence useful in the methods of the invention” is taken to mean a nucleic acid sequence capable of encoding such a BIHD1 polypeptide. The nucleic acid sequence to be introduced into a plant (and therefore useful in performing the methods of the invention) is any nucleic acid sequence encoding the type of polypeptide, which will now be described, hereafter also named “BIHD1 nucleic acid sequence” or “BIHD1 gene”.

[0167] A “BIHD1 polypeptide” as defined herein refers to any polypeptide having in increasing order of preference at least 50%, 55%, 60%, 65%, 70%, 75%, 80%, 85%, 90%, 95%, 98%, 99% or more amino acid sequence identity to a BIHD1 polypeptide as represented by SEQ ID NO: 67.

[0168] Alternatively or additionally, a “BIHD1 polypeptide” as defined herein refers to any polypeptide comprising: (i) a homeobox domain with an InterPro accession IPRO001356; (ii) a POX domain with an InterPro accession IPRO06563; and (ii) at least one predicted coiled coil domain.

[0169] Alternatively or additionally, an “BIHD1 polypeptide” as defined herein refers to any polypeptide sequence which when used in the construction of a BIHD1 phylogenetic tree, such as the one depicted in FIG. 4, clusters with the clade of BELL-1 homeodomain polypeptides rather than with any other homeodomain polypeptide clade.

[0170] Alternatively or additionally, a “BIHD1 polypeptide” as defined herein refers to any polypeptide having in increasing order of preference at least 50%, 55%, 60%, 65%, 70%, 75%, 80%, 85%, 90%, 95%, 98%, 99% or more amino acid sequence identity to any of the polypeptide sequences given in Table A2 herein.

[0171] Analysis of the polypeptide sequence of SEQ ID NO: 67 is presented below in Example 4 herein. For example, a BIHD1 polypeptide as represented by SEQ ID NO: 67 comprises a homeobox domain with an InterPro accession IPRO001356, and a POX domain with InterPro accession number IPRO006563, amongst others. Domains may also be identified using routine techniques, such as by sequence alignment. An alignment of the polypeptides of Table A2, is shown in FIG. 6. Such alignments are useful for identifying the most conserved domains between the BIHD1 polypeptides, such as the SKY box, and the VSLTGL box, named after the conserved amino acid residues they comprise.

[0172] Concerning MYB30 polypeptides/genes, any reference hereinafter to a “protein useful in the methods of the invention” is taken to mean a MYB30 polypeptide as defined herein. Any reference hereinafter to a “nucleic acid useful in the methods of the invention” is taken to mean a nucleic acid capable of encoding such a MYB30 polypeptide. The nucleic acid to be introduced into a plant (and therefore useful in performing the methods of the invention) is any nucleic acid encoding the type of protein which will now be described, hereafter also named “MYB30 nucleic acid” or “MYB30 gene”.

[0173] A “MYB30 polypeptide” as defined herein refers to any R2R3MYB polypeptide comprising at least one, preferably two SANT domains (SMART entry SM00717, Myb_DNA-binding domain (Pfam entry PF00249)). In addition, a “MYB30 polypeptide” furthermore comprises one or more of Motifs 9 to 11 preferably Motif 9.

[0174] Alternatively, A “MYB30 polypeptide” refers to a polypeptide sequence which when used in the construction of a phylogenetic tree, such as the one depicted in Stracke et al. 2001, clusters within the clade defined by AtMYB60, AtMYB30, AtMYB31, AtMYB96 and AtMYB94 polypeptides comprising the amino acid sequence represented by SEQ ID NO: 91 rather than with any other group.

Motif 9 (SEQ ID NO: 119): QGsLSL[IF]EKWLFd[DE] [x][SG]; wherein X in position +15 can be any or no amino acid but preferably in increasing order of preference one of S, G, D, Q, A;
Motif 10 (SEQ ID NO: 120): NI[AS][RK][LM]LXG[WF]MK; wherein X in position +7 can be any or no amino acid;

### Motif 11 (SEQ ID NO: 121): YASSX[ED];

[0175] wherein a single capital letter is given if the relative frequency of a single residue at a certain position is greater than 50% and greater than twice that of the second most frequent residue. When no single residue satisfied these criteria, a pair of residues was assigned as capital letters in brackets if the sum of their relative frequencies exceeded 75%. If neither of these two criteria was fulfilled, a lower-case letter was given if the relative frequency of a residue is greater than 40%. Otherwise, x is given. This consensus sequences follow the criteria of Joshi et al. 1997. Plant Mol Biol 35:993-1001.

[0176] Preferably a MYB30 protein useful in the methods of the invention comprises any one of the following:

Motif 9 (SEQ ID NO: 119): QGSLSL[I/F]EKWLFD[D/E]x[S/G]; wherein 1 to 8 amino acids may be substituted by any amino acid.
Motif 10 (SEQ ID NO: 120): NI[A/S][R/K][L/M]LXG[W/F]MK; wherein X is any or no amino acid and wherein 1 to 6 amino acids may be substituted by any amino acid.
Motif 11 (SEQ ID NO: 121): YASSX[ED]; wherein X is any or no amino acid and wherein 1 to 6 amino acids may be substituted by any amino acid.

[0177] Preferably MYB30 polypeptides useful in the methods of the invention bind to DNA fragments comprising any one of the Myb DNA-binding motifs well known in the art as for example those described by Jamin et al (1996) Int. J. Quantum Chem. 59, 333-341. (GTAACGGTCTAC); or G[G/T]T[A/T]G[G/T]T (PNAS 93, 14972-14977 (1996)); or GGTTTAG (J. Biol. Chem., Vol. 276, Issue 19, 16511-16519, 2001).

[0178] Preferably, the MYB30 protein useful in the methods of the invention comprises a conserved domain having in increasing order of preference at least 50%, 51%, 52%, 53%, 54%, 55%, 56%, 57%, 58%, 59%, 60%, 61%, 62%, 63%, 64%, 65%, 66%, 67%, 68%, 69%, 70%, 71%, 72%, 73%, 74%, 75%, 76%, 77%, 78%, 79%, 80%, 81%, 82%, 83%, 84%, 85%, 86%, 87%, 88%, 89%, 90%, 91%, 92%, 93%, 94%, 95%, 96%, 97%, 98%, or 99% sequence identity to the amino acid domain set forth in Table C3 of the Examples section or to any of the Motifs 1 to 3; provided that the homologous protein comprises the conserved motifs as outlined above. The sequence identity is determined using an alignment algorithm, such as the Needleman Wunsch algorithm in the program GAP (GCG Wisconsin Package, Accelrys), preferably with default parameters or BLAST.

[0179] Alternatively, the homologue of a MYB30 protein has in increasing order of preference at least 50%, 51%, 52%, 53%, 54%, 55%, 56%, 57%, 58%, 59%, 60%, 61%, 62%, 63%, 64%, 65%, 66%, 67%, 68%, 69%, 70%, 71%, 72%, 73%, 74%, 75%, 76%, 77%, 78%, 79%, 80%, 81%, 82%, 83%, 84%, 85%, 86%, 87%, 88%, 89%, 90%, 91%, 92%, 93%, 94%, 95%, 96%, 97%, 98%, or 99% overall sequence identity to the amino acid represented by SEQ ID NO: 89, provided that the homologous protein comprises the conserved motifs as outlined above. The overall sequence identity is determined using a global alignment algorithm, such as the Needleman Wunsch algorithm in the program GAP (GCG Wisconsin Package, Accelrys), preferably with default parameters. Compared to overall sequence identity, the sequence identity will generally be higher when only conserved domains or motifs are considered.

[0180] Preferably, the polypeptide sequence which when used in the construction of a phylogenetic tree, such as the one depicted in Stracke et al. 2001, clusters within the clade defined by AtMYB60, AtMYB30, AtMYB31, AtMYB96, AtMYB94 polypeptides comprising the amino acid sequence represented by SEQ ID NO: 91 rather than with any other group.

[0181] Concerning THOM polypeptides/genes, any reference hereinafter to a “protein useful in the methods of the invention” is taken to mean a THOM polypeptide as defined herein. Any reference hereinafter to a “nucleic acid useful in the methods of the invention” is taken to mean a nucleic acid capable of encoding such a THOM polypeptide. The nucleic acid to be introduced into a plant (and therefore useful in performing the methods of the invention) is any nucleic acid encoding the type of protein which will now be described, hereafter also named “THOM nucleic acid” or “THOM gene”.

[0182] A “THOM polypeptide” as defined herein refers to a Class II HD-Zip transcription factor. Class II HD-Zip transcription factors form a defined group of transcription factors, see for example Sakakibara et al. (2001) or Agalou et al. (2008). A “Class II HD-Zip transcription factor” is taken to mean a transcription factor comprising (i) an “N-terminal HD-ZIP” Leucine zipper domain (ii) a homeobox domain, (iii) a HALZ leucine zipper domain associated with the homeobox domain, and (iv) Motifs 12, 13 and 14 given below (in any order).

| | | |
|---|---|---|
| Motif 12 | (SEQ ID NO: 124): | (R/S)(K/R)KLRL |
| and | | |
| Motif 13 | (SEQ ID NO: 125): | RQVEVWFQNRRART |
| | | KL(K/E)QTEVDCE |
| and | | |
| Motif 14 | (SEQ ID NO: 126): | TLXMC(L/P)(S/Q) |
| | | C(E/K/R)(R/H) |

[0183] Wherein X in position 3 can be any amino acid, preferably one of A, L, I, or T. Preferably motif 14 is TLTMCPQCER

[0184] Furthermore, each of motifs 12 to 14 may have a conservative amino acid substitution at any position, examples of conservative substitution are provided in Table 1.

[0185] In addition, a THOM polypeptide preferably also comprises one or more of the following motifs:

| | | |
|---|---|---|
| Motif 15 | (SEQ ID NO: 127): | SPNS(T/A) |
| Motif 16 | (SEQ ID NO: 128): | LGL |
| Motif 17 | (SEQ ID NO: 129): | (E/D)(E/D)(E/D) |
| Motif 18 | (SEQ ID NO: 130): | (E/Q/D)N(R/K)RL |

[0186] Preferably, motif 18 is ENRRL

[0187] The HD-ZIP_N Leucine Zipper domain (Pfam PF04618) is found in the N terminal region of plant homeobox-leucine zipper proteins. Its function is unknown. The homeobox domain (Pfam PF00046) was first identified in a number of drosophila homeotic and segmentation proteins. The domain binds DNA through a helix-turn-helix (HTH) structure. The HTH motif is characterised by two alpha-helices, which make intimate contacts with the DNA and are joined by a short turn. The second helix binds to DNA via a number of hydrogen bonds and hydrophobic interactions, which occur between specific side chains and the exposed bases and thymine methyl groups within the major groove of the DNA. The first helix helps to stabilise the structure. The motif is very similar in sequence and structure in a wide range of DNA-binding proteins (e.g., cro and repressor proteins, homeotic proteins, etc.). One of the principal differences between HTH motifs in these different proteins arises from the stereo-chemical requirement for glycine in the turn which is needed to avoid steric interference of the beta-carbon with the main chain: for cro and repressor proteins the glycine appears to be mandatory, while for many of the homeotic and other DNA-binding proteins the requirement is relaxed. The HALZ Leucine Zipper domain (Pfam PF02183) found in THOM polypeptides is a plant specific leucine zipper that is always found associated with a homeobox domain.

[0188] Furthermore, Agalou et al., 2008 reported that an intron in helix 2 of the homeodomain in class II HD-zip transcription factors in Arabidopsis and rice is not present in class I nor in class III

[0189] Alternatively, the homologue of a THOM protein has in increasing order of preference at least 25%, 26%, 27%, 28%, 29%, 30%, 31%, 32%, 33%, 34%, 35%, 36%, 37%, 38%, 39%, 40%, 41%, 42%, 43%, 44%, 45%, 46%, 47%, 48%, 49%, 50%, 51%, 52%, 53%, 54%, 55%, 56%, 57%, 58%, 59%, 60%, 61%, 62%, 63%, 64%, 65%, 66%, 67%, 68%, 69%, 70%, 71%, 72%, 73%, 74%, 75%, 76%, 77%, 78%, 79%, 80%, 81%, 82%, 83%, 84%, 85%, 86%, 87%, 88%, 89%, 90%, 91%, 92%, 93%, 94%, 95%, 96%, 97%, 98%, or 99% overall sequence identity to the amino acid represented by SEQ ID NO: 123, provided that the homologous protein comprises the conserved motifs as outlined above. The overall sequence identity is determined using a global alignment algorithm, such as the Needleman Wunsch algorithm in the program GAP (GCG Wisconsin Package, Accelrys), preferably with default parameters and preferably with sequences of mature proteins (i.e. without taking into account secretion signals or transit peptides). Compared to overall sequence identity, the sequence identity will generally be higher when only conserved domains or motifs are considered.

[0190] Preferably, the polypeptide sequence which when used in the construction of a phylogenetic tree, such as the one depicted in FIG. 3 of Sakakibara et al. (2001), clusters within the group of Class II HD-zip transcription factors comprising THOM1 and the amino acid sequence represented by SEQ ID NO: 123 rather than with any other group.

[0191] Concerning BIHD2 polypeptides/genes, any reference hereinafter to a “protein useful in the methods of the invention” is taken to mean a BIHD2 polypeptide as defined herein. Any reference hereinafter to a “nucleic acid sequence useful in the methods of the invention” is taken to mean a nucleic acid sequence capable of encoding such a BIHD2 polypeptide. The nucleic acid sequence to be introduced into a plant (and therefore useful in performing the methods of the invention) is any nucleic acid sequence encoding the type of polypeptide, which will now be described, hereafter also named “BIHD2 nucleic acid sequence” or “BIHD2 gene”.

[0192] A “BIHD2 polypeptide” as defined herein refers to any polypeptide having in increasing order of preference at least 50%, 55%, 60%, 65%, 70%, 75%, 80%, 85%, 90%, 95%, 98%, 99% or more amino acid sequence identity to a BIHD2 polypeptide as represented by SEQ ID NO: 193.

[0193] Alternatively or additionally, a “BIHD2 polypeptide” as defined herein refers to any polypeptide comprising: (i) a homeobox domain with an InterPro accession IPRO001356 and (ii) a POX domain with an InterPro accession IPRO06563.

[0194] A preferred BIHD2 polypeptide useful in the methods of the invention refers to a polypeptide comprising a domain having at least 50%, 51%, 52%, 53%, 54%, 55%, 56%, 57%, 58%, 59%, 60%, 61%, 62%, 63%, 64%, 65%, 66%, 67%, 68%, 69%, 70%, 71%, 72%, 73%, 74%, 75%, 76%, 77%, 78%, 79%, 80%, 81%, 82%, 83%, 84%, 85%, 86%, 87%, 88%, 89%, 90%, 91%, 92%, 93%, 94%, 95%, 96%, 97%, 98%, or 99% overall sequence identity to any of the domains i) a homeobox domain with an InterPro accession IPRO001356; (ii) a POX domain with an InterPro accession IPRO06563 as present in any of the polypeptides of Table A5 of Example 1, preferably as present in SEQ ID NO: 193.

[0195] Alternatively or additionally, a “BIHD2 polypeptide” as defined herein refers to any polypeptide having in increasing order of preference at least at least 50 51%, 52%, 53%, 54%, 55%, 56%, 57%, 58%, 59%, 60%, 61%, 62%, 63%, 64%, 65%, 66%, 67%, 68%, 69%, 70%, 71%, 72%, 73%, 74%, 75%, 76%, 77%, 78%, 79%, 80%, 81%, 82%, 83%, 84%, 85%, 86%, 87%, 88%, 89%, 90%, 91%, 92%, 93%, 94%, 95%, 96%, 97%, 98%, or 99% or more amino acid sequence identity to any of the polypeptide sequences given in Table A5 of Example 1 herein.

[0196] The terms “domain”, “signature” and “motif” are defined in the “definitions” section herein. Specialist databases exist for the identification of domains, for example, SMART (Schultz et al. (1998) Proc. Natl. Acad. Sci. USA 95, 5857-5864; Letunic et al. (2002) Nucleic Acids Res 30, 242-244), InterPro (Mulder et al., (2003) Nucl. Acids. Res. 31, 315-318), Prosite (Bucher and Bairoch (1994), A generalized profile syntax for biomolecular sequences motifs and its function in automatic sequence interpretation. (In) ISMB-94; Proceedings 2nd International Conference on Intelligent Systems for Molecular Biology. Altman R., Brutlag D., Karp P., Lathrop R., Searls D., Eds., pp 53-61, AAAI Press, Menlo Park; Hulo et al., Nucl. Acids. Res. 32:D134-D137, (2004)), or Pfam (Bateman et al., Nucleic Acids Research 30(1): 276-280 (2002)). A set of tools for in silico analysis of protein sequences is available on the ExPASy proteomics server (Swiss Institute of Bioinformatics (Gasteiger et al., ExPASy: the proteomics server for in-depth protein knowledge and analysis, Nucleic Acids Res. 31:3784-3788 (2003)). Domains or motifs may also be identified using routine techniques, such as by sequence alignment.

[0197] Concerning BIHD2 sequences, analysis of the polypeptide sequence of SEQ ID NO: 193 is presented below in Example 4 herein. For example, a BIHD2 polypeptide as represented by SEQ ID NO: 193 comprises a homeobox domain with an InterPro accession IPRO001356, and a POX domain with InterPro accession number IPRO006563, amongst others. Domains may also be identified using routine techniques, such as by sequence alignment. An alignment of the polypeptides of Table A5, is shown in FIG. 14. Such alignments are useful for identifying the most conserved domains between the BIHD2 polypeptides, such as the GPFTGY box, the SNWFINARV box, the RGLP box, and the HFLHPYP box, named after the conserved amino acid residues they comprise.

[0198] Methods for the alignment of sequences for comparison are well known in the art, such methods include GAP, BESTFIT, BLAST, FASTA and TFASTA. GAP uses the algorithm of Needleman and Wunsch ((1970) J Mol Biol 48: 443-453) to find the global (i.e. spanning the complete sequences) alignment of two sequences that maximizes the number of matches and minimizes the number of gaps. The BLAST algorithm (Altschul et al. (1990) J Mol Biol 215: 403-10) calculates percent sequence identity and performs a statistical analysis of the similarity between the two sequences. The software for performing BLAST analysis is publicly available through the National Centre for Biotechnology Information (NCBI). Homologues may readily be identified using, for example, the ClustalW multiple sequence alignment algorithm (version 1.83), with the default pairwise alignment parameters, and a scoring method in percentage. Global percentages of similarity and identity may also be determined using one of the methods available in the MatGAT software package (Campanella et al., BMC Bioinformatics. 2003 Jul. 10; 4:29. MatGAT: an application that generates similarity/identity matrices using protein or DNA sequences.). Minor manual editing may be performed to optimise alignment between conserved motifs, as would be apparent to a person skilled in the art. Furthermore, instead of using full-length sequences for the identification of homologues, specific domains may also be used. The sequence identity values may be determined over the entire nucleic acid or amino acid sequence or over selected domains or conserved motif(s), using the programs mentioned above using the default parameters. For local alignments, the Smith-Waterman algorithm is particularly useful (Smith T F, Waterman M S (1981) J. Mol. Biol 147(1); 195-7).

[0199] Concerning B1HD1 sequences, Example 3 herein describes in Table B2 the percentage identity between the BIHD1 polypeptide as represented by SEQ ID NO: 67 and the BIHD1 polypeptides listed in Table A2. The percentage amino acid sequence identity between the BIHD1 polypeptide as represented by SEQ ID NO: 67 and the BIHD1 polypeptides listed in Table A2 is of at least 35%. Amino acid sequence identity outside of the homeobox domain of homeodomain transcription factors is commonly known to be low.

[0200] The task of protein subcellular localisation prediction is important and well studied. Knowing a protein's localisation helps elucidate its function. Experimental methods for protein localization range from immunolocalization to tagging of proteins using green fluorescent protein (GFP) or beta-glucuronidase (GUS). Such methods are accurate although labor-intensive compared with computational methods. Recently much progress has been made in computational prediction of protein localisation from sequence data. Among algorithms well known to a person skilled in the art are available at the ExPASy Proteomics tools hosted by the Swiss Institute for Bioinformatics, for example, PSort, TargetP, ChloroP, LocTree, Predotar, LipoP, MITOPROT, PATS, PTS1, SignalP, TMHMM, and others.

[0201] Concerning BIHD2 sequences, the prediction of the subcellular localisation and topology of a BIHD1 polypeptide as represented by SEQ ID NO: 67 is described in Examples 5 and 6 of the present application.

[0202] Concerning BIHD2 sequences, the prediction of the subcellular localisation and topology of a BIHD2 polypeptide as represented by SEQ ID NO: 193 is described in Examples 5 and 6 of the present application.

[0203] Furthermore, ODC polypeptides (at least in their native form) typically have Ornithine decarboxylase activity. Tools and techniques for measuring Ornithine decarboxylase activity are well known in the art. Further details are provided in Example 8.

[0204] In addition, ODC polypeptides, when expressed in rice according to the methods of the present invention as outlined in Examples 9 and 10, give plants having increased yield related traits, in particular on or more of increased biomass, increased early vigour, increased total seed weight, increased number of seeds per plant and increased number of filled seeds.

[0205] Furthermore, MYB30 polypeptides typically have DNA-binding activity and an activation domain. A person skilled in the art may easily determine the presence of an activation domain and DNA-binding activity using routine techniques and procedures for example as that described in Xue G P. Plant J. 2005. 41(4):638-49) and references therein. Proteins interacting with MYB30 polypeptides (for example in transcriptional complexes) may easily be identified using standard techniques for a person skilled in the art, such as two-hybrid interaction. It is postulated that MYB30 proteins interact with BHLH transcription factors (Zimmerman et al., Plant Journal 40, 22-34, 2004).

[0206] In addition, MYB30 polypeptides, when expressed in rice according to the methods of the present invention as outlined in Examples 9 and 10, give plants having increased yield related traits, in particular increased biomass and/or increased emergence vigour.

[0207] Furthermore, THOM polypeptides exhibit the general biological activity of transcription factors (at least in their native form) and typically have DNA-binding activity. Tools and techniques for measuring DNA-binding activity are well known in the art. Sessa et al., (J. Mol. Biol. 274, 303-309, 1997) studied the DNA-binding properties of the ATHB-1 and ATHB-2 (=HAT4) HD-Zip (HD-Zip-1 and -2) domains and found that they interact with DNA as homodimers and recognize two distinct 9 bp pseudopalindromic sequences, CAAT(A/T)ATTG (BS-1) and CAAT(G/C)ATTG (BS-2), respectively. From a mutational analysis of the HD-Zip-2 domain, they determined that conserved amino acid residues of helix 3, Va147 and Asn51, and Arg55 are essential for the DNA-binding activity of the HD-Zip-2 domain. They also report that the preferential recognition of a G/C base-pair at the central position by the HD-Zip-2 domain is abolished either by the replacement of Arg55 with lysine or by the substitution of Glu46 and Thr56 with the corresponding residues of the HD-Zip-1 domain (alanine and tryptophan, respectively). Further details are provided in Example 8.

[0208] In addition, THOM polypeptides, when expressed in rice according to the methods of the present invention as outlined in Examples 9, 10 and 11, give plants having increased yield related traits, in particular increased seed yield.

[0209] Concerning Ornithin Decarboxylase sequences, the present invention is illustrated by transforming plants with the nucleic acid sequence represented by SEQ ID NO: 1, encoding the polypeptide sequence of SEQ ID NO: 2. However, performance of the invention is not restricted to these sequences; the methods of the invention may advantageously be performed using any ODC-encoding nucleic acid or ODC polypeptide as defined herein.

[0210] Concerning Ornithin Decarboxylase sequences, examples of nucleic acids encoding ODC polypeptides are given in Table A1 of Example 1 herein. Such nucleic acids are useful in performing the methods of the invention. The amino acid sequences given in Table A1 of Example 1 are example sequences of orthologues and paralogues of the ODC polypeptide represented by SEQ ID NO: 2, the terms “orthologues” and “paralogues” being as defined herein. Further orthologues and paralogues may readily be identified by performing a so-called reciprocal blast search. Typically, this involves a first BLAST involving BLASTing a query sequence (for example using any of the sequences listed in Table A1 of Example 1) against any sequence database, such as the publicly available NCBI database. BLASTN or TBLASTX (using standard default values) are generally used when starting from a nucleotide sequence, and BLASTP or TBLASTN (using standard default values) when starting from a protein sequence. The BLAST results may optionally be filtered. The full-length sequences of either the filtered results or non-filtered results are then BLASTed back (second BLAST) against sequences from the organism from which the query sequence is derived (where the query sequence is SEQ ID NO: 1 or SEQ ID NO: 2, the second BLAST would therefore be against Nicotiana tabacum sequences). The results of the first and second BLASTs are then compared. A paralogue is identified if a high-ranking hit from the first blast is from the same species as from which the query sequence is derived, a BLAST back then ideally results in the query sequence amongst the highest hits; an orthologue is identified if a high-ranking hit in the first BLAST is not from the same species as from which the query sequence is derived, and preferably results upon BLAST back in the query sequence being among the highest hits.

[0211] Concerning BIHD1 sequences, the present invention is illustrated by transforming plants with the nucleic acid sequence represented by SEQ ID NO: 66, encoding the BIHD1 polypeptide sequence of SEQ ID NO: 67. However, performance of the invention is not restricted to these sequences; the methods of the invention may advantageously be performed using any nucleic acid sequence encoding a BIHD1 polypeptide as defined herein.

[0212] Concerning BIHD1 sequences, examples of nucleic acid sequences encoding BIHD1 polypeptides are given in Table A2 of Example 1 herein. Such nucleic acid sequences are useful in performing the methods of the invention. The polypeptide sequences given in Table A2 of Example 1 are example sequences of orthologues and paralogues of the BIHD1 polypeptide represented by SEQ ID NO: 67, the terms “orthologues” and “paralogues” being as defined herein. Further orthologues and paralogues may readily be identified by performing a so-called reciprocal blast search. Typically, this involves a first BLAST involving BLASTing a query sequence (for example using any of the sequences listed in Table A2 of Example 1) against any sequence database, such as the publicly available NCBI database. BLASTN or TBLASTX (using standard default values) are generally used when starting from a nucleotide sequence, and BLASTP or TBLASTN (using standard default values) when starting from a protein sequence. The BLAST results may optionally be filtered. The full-length sequences of either the filtered results or non-filtered results are then BLASTed back (second BLAST) against sequences from the organism from which the query sequence is derived (where the query sequence is SEQ ID NO: 66 or SEQ ID NO: 67, the second BLAST would therefore be against Oryza sative sequences). The results of the first and second BLASTs are then compared. A paralogue is identified if a high-ranking hit from the first blast is from the same species as from which the query sequence is derived, a BLAST back then ideally results in the query sequence amongst the highest hits; an orthologue is identified if a high-ranking hit in the first BLAST is not from the same species as from which the query sequence is derived, and preferably results upon BLAST back in the query sequence being among the highest hits.

[0213] Concerning MYB30 sequences, the present invention is illustrated by transforming plants with the nucleic acid sequence represented by SEQ ID NO: 88, encoding the polypeptide sequence of SEQ ID NO: 89. However, performance of the invention is not restricted to these sequences; the methods of the invention may advantageously be performed using any MYB30-encoding nucleic acid or MYB30 polypeptide as defined herein.

[0214] Concerning MYB30 sequences, examples of nucleic acids encoding MYB30 polypeptides are given in Table A3 of Example 1 herein. Such nucleic acids are useful in performing the methods of the invention. The amino acid sequences given in Table A3 of Example 1 are example sequences of orthologues and paralogues of the MYB30 polypeptide represented by SEQ ID NO: 89, the terms “orthologues” and “paralogues” being as defined herein. Further orthologues and paralogues may readily be identified by performing a so-called reciprocal blast search. Typically, this involves a first BLAST involving BLASTing a query sequence (for example using any of the sequences listed in Table A3 of Example 1) against any sequence database, such as the publicly available NCBI database. BLASTN or TBLASTX (using standard default values) are generally used when starting from a nucleotide sequence, and BLASTP or TBLASTN (using standard default values) when starting from a protein sequence. The BLAST results may optionally be filtered. The full-length sequences of either the filtered results or non-filtered results are then BLASTed back (second BLAST) against sequences from the organism from which the query sequence is derived (where the query sequence is SEQ ID NO: 88 or SEQ ID NO: 89, the second BLAST would therefore be against Arabidopsis thaliana sequences). The results of the first and second BLASTs are then compared. A paralogue is identified if a high-ranking hit from the first blast is from the same species as from which the query sequence is derived, a BLAST back then ideally results in the query sequence amongst the highest hits; an orthologue is identified if a high-ranking hit in the first BLAST is not from the same species as from which the query sequence is derived, and preferably results upon BLAST back in the query sequence being among the highest hits.

[0215] Concerning THOM sequences, the present invention is illustrated by transforming plants with the nucleic acid sequence represented by SEQ ID NO: 122, encoding the polypeptide sequence of SEQ ID NO: 123. However, performance of the invention is not restricted to these sequences; the methods of the invention may advantageously be performed using any THOM-encoding nucleic acid or THOM polypeptide as defined herein.

[0216] Examples of nucleic acids encoding THOM polypeptides are given in Table A4 of Example 1 herein. Such nucleic acids are useful in performing the methods of the invention. The amino acid sequences given in Table A4 of The Examples section are example sequences of orthologues and paralogues of the THOM polypeptide represented by SEQ ID NO: 123, the terms “orthologues” and “paralogues” being as defined herein. Further orthologues and paralogues may readily be identified by performing a so-called reciprocal blast search. Typically, this involves a first BLAST involving BLASTing a query sequence (for example using any of the sequences listed in Table A4 of The Examples section) against any sequence database, such as the publicly available NCBI database. BLASTN or TBLASTX (using standard default values) are generally used when starting from a nucleotide sequence, and BLASTP or TBLASTN (using standard default values) when starting from a protein sequence. The BLAST results may optionally be filtered. The full-length sequences of either the filtered results or non-filtered results are then BLASTed back (second BLAST) against sequences from the organism from which the query sequence is derived (where the query sequence is SEQ ID NO: 122 or SEQ ID NO: 123, the second BLAST would therefore be against Solanum Lycopersicum sequences). The results of the first and second BLASTs are then compared. A paralogue is identified if a high-ranking hit from the first blast is from the same species as from which the query sequence is derived, a BLAST back then ideally results in the query sequence amongst the highest hits; an orthologue is identified if a high-ranking hit in the first BLAST is not from the same species as from which the query sequence is derived, and preferably results upon BLAST back in the query sequence being among the highest hits.

[0217] Concerning BIHD2 sequences, the present invention is illustrated by transforming plants with the nucleic acid sequence represented by SEQ ID NO: 192, encoding the BIHD2 polypeptide sequence of SEQ ID NO: 193. However, performance of the invention is not restricted to these sequences; the methods of the invention may advantageously be performed using any nucleic acid sequence encoding a BIHD2 polypeptide as defined herein.

[0218] Examples of nucleic acid sequences encoding BIHD2 polypeptides are given in Table A5 of Example 1 herein. Such nucleic acid sequences are useful in performing the methods of the invention. The polypeptide sequences given in Table A5 of Example 1 are example sequences of orthologues and paralogues of the BIHD2 polypeptide represented by SEQ ID NO: 193, the terms “orthologues” and “paralogues” being as defined herein. Further orthologues and paralogues may readily be identified by performing a so-called reciprocal blast search. Typically, this involves a first BLAST involving BLASTing a query sequence (for example using any of the sequences listed in Table A5 of Example 1) against any sequence database, such as the publicly available NCBI database. BLASTN or TBLASTX (using standard default values) are generally used when starting from a nucleotide sequence, and BLASTP or TBLASTN (using standard default values) when starting from a protein sequence. The BLAST results may optionally be filtered. The full-length sequences of either the filtered results or non-filtered results are then BLASTed back (second BLAST) against sequences from the organism from which the query sequence is derived (where the query sequence is SEQ ID NO: 192 or SEQ ID NO: 193, the second BLAST would therefore be against Medicago sativa sequences). The results of the first and second BLASTs are then compared. A paralogue is identified if a high-ranking hit from the first blast is from the same species as from which the query sequence is derived, a BLAST back then ideally results in the query sequence amongst the highest hits; an orthologue is identified if a high-ranking hit in the first BLAST is not from the same species as from which the query sequence is derived, and preferably results upon BLAST back in the query sequence being among the highest hits.

[0219] High-ranking hits are those having a low E-value. The lower the E-value, the more significant the score (or in other words the lower the chance that the hit was found by chance). Computation of the E-value is well known in the art. In addition to E-values, comparisons are also scored by percentage identity. Percentage identity refers to the number of identical nucleotides (or amino acids) between the two compared nucleic acid (or polypeptide) sequences over a particular length. In the case of large families, ClustalW may be used, followed by a neighbour joining tree, to help visualize clustering of related genes and to identify orthologues and paralogues.

[0220] Nucleic acid variants may also be useful in practising the methods of the invention. Examples of such variants include nucleic acid sequences encoding homologues and derivatives of any one of the polypeptide sequences given in Table A1-A5 of Example 1, the terms “homologue” and “derivative” being as defined herein. Also useful in the methods of the invention are nucleic acid sequences encoding homologues and derivatives of orthologues or paralogues of any one of the polypeptide sequences given in Table A1-A5 of Example 1. Homologues and derivatives useful in the methods of the present invention have substantially the same biological and functional activity as the unmodified protein from which they are derived.

[0221] Further nucleic acid variants useful in practising the methods of the invention include portions of nucleic acids sequences encoding ODC polypeptides, or BIHD1 polypeptides, or MYB30 polypeptides, or THOM polypeptides, or BIHD2 polypeptides, nucleic acids hybridising to nucleic acids encoding ODC polypeptides, or BIHD1 polypeptides, or MYB30 polypeptides, or THOM polypeptides, or BIHD2 polypeptides, splice variants of nucleic acids encoding ODC polypeptides, or BIHD1 polypeptides, or MYB30 polypeptides, or THOM polypeptides, or BIHD2 polypeptides, allelic variants of nucleic acids encoding ODC polypeptides and variants of nucleic acids encoding ODC polypeptides, or BIHD1 polypeptides, or MYB30 polypeptides, or THOM polypeptides, or BIHD2 polypeptides, obtained by gene shuffling. The terms hybridising sequence, splice variant, allelic variant and gene shuffling are as described herein.

[0222] Nucleic acids encoding ODC polypeptides, or BIHD1 polypeptides, or MYB30 polypeptides, or THOM polypeptides, or BIHD2 polypeptides, need not be full-length nucleic acids, since performance of the methods of the invention does not rely on the use of full-length nucleic acid sequences. According to the present invention, there is provided a method for enhancing yield-related traits in plants, comprising introducing and expressing in a plant a portion of any one of the nucleic acid sequences given in Table A1-A5 of Example 1, or a portion of a nucleic acid encoding an orthologue, paralogue or homologue of any of the amino acid sequences given in Table A1-A5 of Example 1.

[0223] A portion of a nucleic acid sequence may be prepared, for example, by making one or more deletions to the nucleic acid sequence. The portions may be used in isolated form or they may be fused to other coding (or non-coding) sequences in order to, for example, produce a protein that combines several activities. When fused to other coding sequences, the resultant polypeptide produced upon translation may be bigger than that predicted for the protein portion.

[0224] Concerning ODC polypeptides, portions useful in the methods of the invention, encode an ODC polypeptide as defined herein, and have substantially the same biological activity as the amino acid sequences given in Table A1 of Example 1. Preferably, the portion is a portion of any one of the nucleic acids given in Table A1 of Example 1, or is a portion of a nucleic acid encoding an orthologue or paralogue of any one of the amino acid sequences given in Table A1 of Example 1. Preferably the portion is at least 200, 300, 400, 500, 550, 600, 650, 700, 750, 800, 850, 900, 950, 1000, 1500 consecutive nucleotides in length, the consecutive nucleotides being of any one of the nucleic acid sequences given in Table A1 of Example 1, or of a nucleic acid encoding an orthologue or paralogue of any one of the amino acid sequences given in Table A1 of Example 1. Most preferably the portion is a portion of the nucleic acid of SEQ ID NO: 1. Preferably, the portion encodes a fragment of an amino acid sequence which, when used in the construction of a phylogenetic tree, such as the one depicted in FIG. 2, clusters preferably with the group of ODC polypeptides, most preferably with the group comprising the amino acid sequence represented by SEQ ID NO: 2 rather than with any other group.

[0225] Concerning BIHD1 polypeptides, portions useful in the methods of the invention, encode a BIHD1 polypeptide as defined herein, and have substantially the same biological activity as the polypeptide sequences given in Table A2 of Example 1. Preferably, the portion is a portion of any one of the nucleic acid sequences given in Table A2 of Example 1, or is a portion of a nucleic acid sequence encoding an orthologue or paralogue of any one of the polypeptide sequences given in Table A2 of Example 1. Preferably the portion is, in increasing order of preference at least 1300, 1350, 1400, 1450, 1500, 1550, 1600, 1650, 1700, 1750, 1800, 1850, 1900, 1925, or more consecutive nucleotides in length, the consecutive nucleotides being of any one of the nucleic acid sequences given in Table A2 of Example 1, or of a nucleic acid sequence encoding an orthologue or paralogue of any one of the polypeptide sequences given in Table A2 of Example 1. Preferably, the portion is a portion of a nucleic sequence encoding a polypeptide sequence having in increasing order of preference at least 50%, 55%, 60%, 65%, 70%, 75%, 80%, 85%, 90%, 95%, 98%, 99% or more amino acid sequence identity to a BIHD1 polypeptide as represented by SEQ ID NO: 67. More preferably, the portion is a portion of the nucleic acid sequence as represented by SEQ ID NO: 66.

[0226] Concerning MYB30 polypeptides, portions useful in the methods of the invention, encode a MYB30 polypeptide as defined herein, and have substantially the same biological activity as the amino acid sequences given in Table A3 of Example 1. Preferably, the portion is a portion of any one of the nucleic acids given in Table A3 of Example 1, or is a portion of a nucleic acid encoding an orthologue or paralogue of any one of the amino acid sequences given in Table A3 of Example 1. Preferably the portion is at least 400, 500, 550, 600, 650, 700, 750, 800, 850, 900, 950, 1000 consecutive nucleotides in length, the consecutive nucleotides being of any one of the nucleic acid sequences given in Table A3 of Example 1, or of a nucleic acid encoding an orthologue or paralogue of any one of the amino acid sequences given in Table A3 of Example 1. Most preferably the portion is a portion of the nucleic acid of SEQ ID NO: 88.

[0227] Concerning MYB30 polypeptides, preferably, the portion encodes a fragment of an amino acid sequence which, when used in the construction of a phylogenetic tree, such as the one depicted in Stracke et al. 2001, clusters within the clade defined by AtMYB60, AtMYB30, AtMYB31, AtMYB96, AtMYB94 polypeptides comprising the amino acid sequence represented by SEQ ID NO: 91 rather than with any other group.

[0228] Concerning THOM polypeptides, portions useful in the methods of the invention, encode a THOM polypeptide as defined herein, and have substantially the same biological activity as the amino acid sequences given in Table A4 of Example 1. Preferably, the portion is a portion of any one of the nucleic acids given in Table A4 of Example 1, or is a portion of a nucleic acid encoding an orthologue or paralogue of any one of the amino acid sequences given in Table A4 of Example 1. Preferably the portion is at least 500, 550, 600, 650, 700, 750, 800, 850, 900, 950, 1000, 1050, 1100, 1150, 1200 consecutive nucleotides in length, the consecutive nucleotides being of any one of the nucleic acid sequences given in Table A4 of Example 1, or of a nucleic acid encoding an orthologue or paralogue of any one of the amino acid sequences given in Table A4 of Example 1. Most preferably the portion is a portion of the nucleic acid of SEQ ID NO: 122. Preferably, the portion encodes a fragment of an amino acid sequence which when used in the construction of a phylogenetic tree, such as the one depicted in FIG. 3 of Sakakibara et al. (2001), clusters within the group of Class II HD-zip transcription factors comprising THOM1 and the amino acid sequence represented by SEQ ID NO: 123 rather than with any other group.

[0229] Portions useful in the methods of the invention, encode a BIHD2 polypeptide as defined herein, and have substantially the same biological activity as the polypeptide sequences given in Table A5 of Example 1. Preferably, the portion is a portion of any one of the nucleic acid sequences given in Table A5 of Example 1, or is a portion of a nucleic acid sequence encoding an orthologue or paralogue of any one of the polypeptide sequences given in Table A5 of Example 1. Preferably the portion is, in increasing order of preference at least 20, 50, 100, 200, 300, 400, 500, 600, 700, 800, 900, 1000, 1100, 1200, 1300, 1350, 1400, 1450, 1500, 1550, 1600, 1650, 1700, 1750, 1800, 1850, 1900, 1925, or more consecutive nucleotides in length, the consecutive nucleotides being of any one of the nucleic acid sequences given in Table A5 of Example 1, or of a nucleic acid sequence encoding an orthologue or paralogue of any one of the polypeptide sequences given in Table A5 of Example 1. Preferably, the portion is a portion of a nucleic sequence encoding a polypeptide sequence having in increasing order of preference at least 50%, 55%, 60%, 65%, 70%, 75%, 80%, 85%, 90%, 95%, 98%, 99% or more amino acid sequence identity to a BIHD2 polypeptide as represented by SEQ ID NO: 193. More preferably, the portion is a portion of the nucleic acid sequence as represented by SEQ ID NO: 192.

[0230] Another nucleic acid sequence variant useful in the methods of the invention is a nucleic acid sequence capable of hybridising, under reduced stringency conditions, preferably under stringent conditions, with a nucleic acid sequence encoding an ODC polypeptide, or a BIHD1 polypeptide, or a MYB30 polypeptide, or a THOM polypeptide, or a BIHD2 polypeptide as defined herein, or with a portion as defined herein.

[0231] According to the present invention, there is provided a method for increasing yield-related traits in plants, comprising introducing and expressing in a plant a nucleic acid sequence capable of hybridizing to any one of the nucleic acid sequences given in Table A1-A5 of Example 1, or comprising introducing and expressing in a plant a nucleic acid sequence capable of hybridising to a nucleic acid sequence encoding an orthologue, paralogue or homologue of any of the nucleic acid sequences given in Table A1-A5 of Example 1.

[0232] Concerning ODC polypeptides, hybridising sequences useful in the methods of the invention encode an ODC polypeptide as defined herein, having substantially the same biological activity as the amino acid sequences given in Table A1 of Example 1. Preferably, the hybridising sequence is capable of hybridising to any one of the nucleic acids sequences given in Table A1 of Example 1, or to a portion of any of these sequences, a portion being as defined above, or the hybridising sequence is capable of hybridising to a nucleic acid sequence encoding an orthologue or paralogue of any one of the amino acid sequences given in Table A1 of Example 1. Most preferably, the hybridising sequence is capable of hybridising to a nucleic acid as represented by SEQ ID NO: 1 or to a portion thereof. Preferably, the hybridising sequence encodes a polypeptide with an amino acid sequence which, when full-length and used in the construction of a phylogenetic tree, such as the one depicted in FIG. 2, clusters preferably with the group of ODC polypeptides, most preferably with the group comprising the amino acid sequence represented by SEQ ID NO: 2 rather than with any other group.

[0233] Concerning BIHD1 polypeptides, hybridising sequences useful in the methods of the invention encode a BIHD1 polypeptide as defined herein, and have substantially the same biological activity as the polypeptide sequences given in Table A2 of Example 1. Preferably, the hybridising sequence is capable of hybridising to any one of the nucleic acid sequences given in Table A2 of Example 1, or to a portion of any of these sequences, a portion being as defined above, or wherein the hybridising sequence is capable of hybridising to a nucleic acid sequence encoding an orthologue or paralogue of any one of the polypeptide sequences given in Table A2 of Example 1. Preferably, the hybridising sequence is capable of hybridising to a nucleic acid sequence encoding a polypeptide sequence having in increasing order of preference at least 50%, 55%, 60%, 65%, 70%, 75%, 80%, 85%, 90%, 95%, 98%, 99% or more amino acid sequence identity to a BIHD1 polypeptide as represented by SEQ ID NO: 67. Most preferably, the hybridising sequence is capable of hybridising to a nucleic acid sequence as represented by SEQ ID NO: 66 or to a portion thereof.

[0234] Concerning MYB30 polypeptides, hybridising sequences useful in the methods of the invention encode a MYB30 polypeptide as defined herein, having substantially the same biological activity as the amino acid sequences given in Table A3 of Example 1. Preferably, the hybridising sequence is capable of hybridising to the complement of any one of the nucleic acids given in Table A3 of Example 1, or to a portion of any of these sequences, a portion being as defined above, or the hybridising sequence is capable of hybridising to the complement of a nucleic acid encoding an orthologue or paralogue of any one of the amino acid sequences given in Table A3 of Example 1. Most preferably, the hybridising sequence is capable of hybridising to the complement of a nucleic acid as represented by SEQ ID NO: 88 or to a portion thereof.

[0235] Concerning MYB30 polypeptides, preferably, the hybridising sequence encodes a polypeptide with an amino acid sequence which, when full-length and used in the construction of a phylogenetic tree, such as the one depicted in Stracke et al. 2001, clusters within the clade defined by AtMYB60, AtMYB30, AtMYB31, AtMYB96, AtMYB94 polypeptides comprising the amino acid sequence represented by SEQ ID NO: 91 rather than with any other group.

[0236] Concerning THOM polypeptides, hybridising sequences useful in the methods of the invention encode a THOM polypeptide as defined herein, having substantially the same biological activity as the amino acid sequences given in Table A4 of Example 1. Preferably, the hybridising sequence is capable of hybridising to the complement of any one of the nucleic acids given in Table A4 of Example 1, or to a portion of any of these sequences, a portion being as defined above, or the hybridising sequence is capable of hybridising to the complement of a nucleic acid encoding an orthologue or paralogue of any one of the amino acid sequences given in Table A4 of Example 1. Most preferably, the hybridising sequence is capable of hybridising to the complement of a nucleic acid as represented by SEQ ID NO: 122 or to a portion thereof.

[0237] Concerning THOM polypeptides, preferably, the hybridising sequence encodes a polypeptide with an amino acid sequence which when used in the construction of a phylogenetic tree, such as the one depicted in FIG. 3 of Sakakibara et al. (2001), clusters within the group of Class II HD-zip transcription factors comprising THOM1 and the amino acid sequence represented by SEQ ID NO: 123 rather than with any other group.

[0238] Concerning BIHD2 sequences, hybridising sequences useful in the methods of the invention encode a BIHD2 polypeptide as defined herein, and have substantially the same biological activity as the polypeptide sequences given in Table A5 of Example 1.

[0239] Preferably, the hybridising sequence is capable of hybridising to any one of the nucleic acid sequences given in Table A5 of Example 1, or to a portion of any of these sequences, a portion being as defined above, or wherein the hybridising sequence is capable of hybridising to a nucleic acid sequence encoding an orthologue or paralogue of any one of the polypeptide sequences given in Table A5 of Example 1. Preferably, the hybridising sequence is capable of hybridising to a nucleic acid sequence encoding a polypeptide sequence having in increasing order of preference at least 50%, 55%, 60%, 65%, 70%, 75%, 80%, 85%, 90%, 95%, 98%, 99% or more amino acid sequence identity to a BIHD2 polypeptide as represented by SEQ ID NO: 193. Most preferably, the hybridising sequence is capable of hybridising to a nucleic acid sequence as represented by SEQ ID NO: 192 or to a portion thereof.

[0240] Another nucleic acid sequence variant useful in the methods of the invention is a splice variant encoding an ODC polypeptide, or a BIHD1 polypeptide, or a MYB30 polypeptide, or a THOM polypeptide, or a BIHD2 polypeptide as defined hereinabove, a splice variant being as defined herein.

[0241] According to the present invention, there is provided a method for enhancing and/or increasing yield-related traits in plants, comprising introducing and expressing in a plant a splice variant of any one of the nucleic acid sequences given in Table A1-A5 of Example 1, or a splice variant of a nucleic acid encoding an orthologue, paralogue or homologue of any of the amino acid sequences given in Table A1-A5 of Example 1.

[0242] Concerning ODC polypeptides, preferred splice variants are splice variants of a nucleic acid represented by SEQ ID NO: 1, or a splice variant of a nucleic acid encoding an orthologue or paralogue of SEQ ID NO: 2. Preferably, the amino acid sequence encoded by the splice variant, when used in the construction of a phylogenetic tree, such as the one depicted in FIG. 2, clusters preferably with the group of ODC polypeptides, most preferably with the group comprising the amino acid sequence represented by SEQ ID NO: 2 rather than with any other group.

[0243] Concerning BIHD1 polypeptides, preferred splice variants are splice variants of a nucleic acid sequence represented by SEQ ID NO: 66, or a splice variant of a nucleic acid sequence encoding an orthologue or paralogue of SEQ ID NO: 67. Preferably, the splice variant is a splice variant of a nucleic acid sequence encoding a polypeptide sequence having in increasing order of preference at least 50%, 55%, 60%, 65%, 70%, 75%, 80%, 85%, 90%, 95%, 98%, 99% or more amino acid sequence identity to a BIHD1 polypeptide as represented by SEQ ID NO: 67.

[0244] Concerning MYB30 polypeptides, preferred splice variants are splice variants of a nucleic acid represented by SEQ ID NO: 88, or a splice variant of a nucleic acid encoding an orthologue or paralogue of SEQ ID NO: 89. Preferably, the amino acid sequence encoded by the splice variant, when used in the construction of a phylogenetic tree, such as the one depicted in Stracke et al. 2001, clusters within the clade defined by AtMYB60, AtMYB30, AtMYB31, AtMYB96, AtMYB94 polypeptides comprising the amino acid sequence represented by SEQ ID NO: 91 rather than with any other group.

[0245] Concerning THOM polypeptides, preferred splice variants are splice variants of a nucleic acid represented by SEQ ID NO: 1, or a splice variant of a nucleic acid encoding an orthologue or paralogue of SEQ ID NO: 2. Preferably, the amino acid sequence encoded by the splice variant, when used in the construction of a phylogenetic tree, such as the one depicted in FIG. 3 of Sakakibara et al. (2001), clusters within the group of Class II HD-zip transcription factors comprising THOM1 and the amino acid sequence represented by SEQ ID NO: 123 rather than with any other group.

[0246] Concering BIHD2 sequences, preferred splice variants are splice variants of a nucleic acid sequence represented by SEQ ID NO: 192, or a splice variant of a nucleic acid sequence encoding an orthologue or paralogue of SEQ ID NO: 193. Preferably, the splice variant is a splice variant of a nucleic acid sequence encoding a polypeptide sequence having in increasing order of preference at least 50%, 55%, 60%, 65%, 70%, 75%, 80%, 85%, 90%, 95%, 98%, 99% or more amino acid sequence identity to a BIHD2 polypeptide as represented by SEQ ID NO: 193.

[0247] Another nucleic acid sequence variant useful in performing the methods of the invention is an allelic variant of a nucleic acid sequence encoding an ODC polypeptide, or a BIHD1 polypeptide, or a MYB30 polypeptide, or a THOM polypeptide, or a BIHD2 polypeptide as defined hereinabove, an allelic variant being as defined herein.

[0248] According to the present invention, there is provided a method for increasing yield-related traits, comprising introducing and expressing in a plant an allelic variant of any one of the nucleic acid sequences given in Table A1-A5 of Example 1, or comprising introducing and expressing in a plant an allelic variant of a nucleic acid sequence encoding an orthologue, paralogue or homologue of any of the polypeptide sequences given in Table A1-A5 of Example 1.

[0249] Concerning ODC polypeptides, the polypeptides encoded by allelic variants useful in the methods of the present invention have substantially the same biological activity as the ODC polypeptide of SEQ ID NO: 2 and any of the amino acids depicted in Table A1 of Example 1. Allelic variants exist in nature, and encompassed within the methods of the present invention is the use of these natural alleles. Preferably, the allelic variant is an allelic variant of SEQ ID NO: 1 or an allelic variant of a nucleic acid encoding an orthologue or paralogue of SEQ ID NO: 2. Preferably, the amino acid sequence encoded by the allelic variant, when used in the construction of a phylogenetic tree, such as the one depicted in FIG. 2, clusters preferably with the group of ODC polypeptides, most preferably with the group comprising the amino acid sequence represented by SEQ ID NO: 2 rather than with any other group.

[0250] Concerning BIHD1 polypeptides, the allelic variants useful in the methods of the present invention have substantially the same biological activity as the BIHD1 polypeptide of SEQ ID NO: 67 and any of the polypeptide sequences depicted in Table A2 of Example 1. Allelic variants exist in nature, and encompassed within the methods of the present invention is the use of these natural alleles. Preferably, the allelic variant is an allelic variant of SEQ ID NO: 66 or an allelic variant of a nucleic acid sequence encoding an orthologue or paralogue of SEQ ID NO: 67. Preferably, the allelic variant is an allelic variant of a polypeptide sequence having in increasing order of preference at least 50%, 55%, 60%, 65%, 70%, 75%, 80%, 85%, 90%, 95%, 98%, 99% or more amino acid sequence identity to a BIHD1 polypeptide as represented by SEQ ID NO: 67.

[0251] Concerning MYB30 polypeptides, the polypeptides encoded by allelic variants useful in the methods of the present invention have substantially the same biological activity as the MYB30 polypeptide of SEQ ID NO: 89 and any of the amino acids depicted in Table A3 of Example 1. Allelic variants exist in nature, and encompassed within the methods of the present invention is the use of these natural alleles. Preferably, the allelic variant is an allelic variant of SEQ ID NO: 88 or an allelic variant of a nucleic acid encoding an orthologue or paralogue of SEQ ID NO: 89. Preferably, the amino acid sequence encoded by the allelic variant, when used in the construction of a phylogenetic tree, such as the one depicted in Stracke et al. 2001, clusters within the clade defined by AtMYB60, AtMYB30, AtMYB31, AtMYB96, AtMYB94 polypeptides comprising the amino acid sequence represented by SEQ ID NO: 91 rather than with any other group.

[0252] Concerning THOM polypeptides, the polypeptides encoded by allelic variants useful in the methods of the present invention have substantially the same biological activity as the THOM polypeptide of SEQ ID NO: 123 and any of the amino acids depicted in Table A4 of Example 1. Allelic variants exist in nature, and encompassed within the methods of the present invention is the use of these natural alleles. Preferably, the allelic variant is an allelic variant of SEQ ID NO: 122 or an allelic variant of a nucleic acid encoding an orthologue or paralogue of SEQ ID NO: 123. Preferably, the amino acid sequence encoded by the allelic variant, when used in the construction of a phylogenetic tree, such as the one depicted in FIG. 13 of Sakakibara et al. (2001), clusters within the group of Class II HD-zip transcription factors comprising THOM1 and the amino acid sequence represented by SEQ ID NO: 123 rather than with any other group.

[0253] Concerning the BIHD2, the allelic variants useful in the methods of the present invention have substantially the same biological activity as the BIHD2 polypeptide of SEQ ID NO: 193 and any of the polypeptide sequences depicted in Table A5 of Example 1. Allelic variants exist in nature, and encompassed within the methods of the present invention is the use of these natural alleles. Preferably, the allelic variant is an allelic variant of SEQ ID NO: 192 or an allelic variant of a nucleic acid sequence encoding an orthologue or paralogue of SEQ ID NO: 193. Preferably, the allelic variant is an allelic variant of a polypeptide sequence having in increasing order of preference at least 50%, 55%, 60%, 65%, 70%, 75%, 80%, 85%, 90%, 95%, 98%, 99% or more amino acid sequence identity to a BIHD2 polypeptide as represented by SEQ ID NO: 193.

[0254] Gene shuffling or directed evolution may also be used to generate variants of nucleic acid sequences encoding ODC polypeptides, or BIHD1 polypeptides, or MYB30 polypeptides, or THOM polypeptides, or BIHD2 polypeptides as defined above, the term “gene shuffling” being as defined herein.

[0255] According to the present invention, there is provided a method for enhancing and/or increasing yield-related traits, comprising introducing and expressing in a plant a variant of any one of the nucleic acid sequences given in Table A1-A5 of Example 1, or comprising introducing and expressing in a plant a variant of a nucleic acid sequence encoding an orthologue, paralogue or homologue of any of the polypeptide sequences given in Table A1-A5 of Example 1, which variant nucleic acid sequence is obtained by gene shuffling.

[0256] Concerning ODC polypeptides, preferably, the amino acid sequence encoded by the variant nucleic acid sequence obtained by gene shuffling, when used in the construction of a phylogenetic tree such as the one depicted in FIG. 2, clusters preferably with the group of ODC polypeptides, most preferably with the group comprising the amino acid sequence represented by SEQ ID NO: 2 rather than with any other group.

[0257] Concerning BIHD1 polypeptides, preferably, the variant nucleic acid sequence obtained by gene shuffling encodes a polypeptide sequence having in increasing order of preference at least 50%, 55%, 60%, 65%, 70%, 75%, 80%, 85%, 90%, 95%, 98%, 99% or more amino acid sequence identity to a BIHD1 polypeptide as represented by SEQ ID NO: 67.

[0258] Concerning MYB30 polypeptides, preferably, the amino acid sequence encoded by the variant nucleic acid obtained by gene shuffling, when used in the construction of a phylogenetic tree such as the one depicted in Stracke et al. 2001, clusters within the clade defined by AtMYB60, AtMYB30, AtMYB31, AtMYB96, AtMYB94 polypeptides comprising the amino acid sequence represented by SEQ ID NO: 91 rather than with any other group.

[0259] Concerning THOM polypeptides, preferably, the amino acid sequence encoded by the variant nucleic acid obtained by gene shuffling, when used in the construction of a phylogenetic tree, such as the one depicted in FIG. 3 of Sakakibara et al. (2001), clusters within the group of Class II HD-zip transcription factors comprising THOM1 and the amino acid sequence represented by SEQ ID NO: 123 rather than with any other group.

[0260] Preferably, the variant nucleic acid sequence obtained by gene shuffling encodes a polypeptide sequence having in increasing order of preference at least 50%, 55%, 60%, 65%, 70%, 75%, 80%, 85%, 90%, 95%, 98%, 99% or more amino acid sequence identity to a BIHD2 polypeptide as represented by SEQ ID NO: 193.

[0261] Furthermore, nucleic acid sequence variants may also be obtained by site-directed mutagenesis. Several methods are available to achieve site-directed mutagenesis, the most common being PCR based methods (Current Protocols in Molecular Biology, Wiley Eds).

[0262] Nucleic acid sequences encoding ODC polypeptides may be derived from any natural or artificial source. The nucleic acid may be modified from its native form in composition and/or genomic environment through deliberate human manipulation. Preferably the ODC polypeptide-encoding nucleic acid is from a plant, further preferably from a dicocotyledonous plant, more preferably from the family Solanaceae, most preferably the nucleic acid is from Nicotiana tabacum.

[0263] Nucleic acid sequences encoding BIHD1 polypeptides may be derived from any natural or artificial source. The nucleic acid sequence may be modified from its native form in composition and/or genomic environment through deliberate human manipulation. The BIHD1 polypeptide-encoding nucleic acid sequence is from the Eukaryota domain, preferably from a plant, further preferably from a monocotyledonous plant, more preferably from the family Poaceae, most preferably the nucleic acid sequence is from Oryza sativa.

[0264] Nucleic acid sequences encoding MYB30 polypeptides may be derived from any natural or artificial source. The nucleic acid may be modified from its native form in composition and/or genomic environment through deliberate human manipulation. Preferably the MYB30 polypeptide-encoding nucleic acid is from a plant, further preferably from a dicotyledonous plant, more preferably from the family Brassicaceae, most preferably the nucleic acid is from Arabidopsis thaliana.

[0265] Nucleic acids encoding THOM polypeptides may be derived from any natural or artificial source. The nucleic acid may be modified from its native form in composition and/or genomic environment through deliberate human manipulation. Preferably the THOM polypeptide-encoding nucleic acid is from a plant, further preferably from a dicotyledonous plant, more preferably from the family Solanaceae, most preferably the nucleic acid is from Solanum Lycopersicum.

[0266] Nucleic acid sequences encoding BIHD2 polypeptides may be derived from any natural or artificial source. The nucleic acid sequence may be modified from its native form in composition and/or genomic environment through deliberate human manipulation. The nucleic acid sequence encoding a BIHD2 polypeptide is from the Eukaryota domain, preferably from a plant, further preferably from a monocotyledonous plant, more preferably from the family Poaceae, most preferably the nucleic acid sequence is from Oryza sativa.

[0267] Performance of the methods of the invention gives plants having enhanced and/or increased yield-related traits relative to control plants. In particular performance of the methods of the invention gives plants having increased yield, especially increased seed yield relative to control plants. The terms “yield” and “seed yield” are described in more detail in the “definitions” section herein.

[0268] Reference herein to enhanced yield-related traits is taken to mean an increase in biomass (weight) of one or more parts of a plant, which may include aboveground (harvestable) parts and/or (harvestable) parts below ground. In particular, such harvestable parts are seeds, and performance of the methods of the invention results in plants having increased seed yield relative to the seed yield of control plants.

[0269] Taking corn as an example, a yield increase may be manifested as one or more of the following: increase in the number of plants established per hectare or acre, an increase in the number of ears per plant, an increase in the number of rows, number of kernels per row, kernel weight, thousand kernel weight, ear length/diameter, increase in the seed filling rate (which is the number of filled seeds divided by the total number of seeds and multiplied by 100), among others. Taking rice as an example, a yield increase may manifest itself as an increase in one or more of the following: number of plants per hectare or acre, number of panicles per plant, number of spikelets per panicle, number of flowers (florets) per panicle (which is expressed as a ratio of the number of filled seeds over the number of primary panicles), increase in the seed filling rate (which is the number of filled seeds divided by the total number of seeds and multiplied by 100), increase in thousand kernel weight, among others.

[0270] The present invention provides a method for increasing yield, especially seed yield of plants, relative to control plants, which method comprises modulating expression in a plant of a nucleic acid sequence encoding an ODC polypeptide, or a MYB30 polypeptide, or a THOM polypeptide as defined herein.

[0271] The present invention also provides a method for increasing yield-related traits of plants relative to control plants, which method comprises increasing expression in a plant of a nucleic acid sequence encoding a BIHD1 polypeptide, or a BIHD2 polypeptide as defined herein.

[0272] Since the transgenic plants according to the present invention have increased yield and/or yield-related traits, it is likely that these plants exhibit an increased growth rate (during at least part of their life cycle), relative to the growth rate of control plants at a corresponding stage in their life cycle.

[0273] The increased growth rate may be specific to one or more parts of a plant (including seeds), or may be throughout substantially the whole plant. Plants having an increased growth rate may have a shorter life cycle. The life cycle of a plant may be taken to mean the time needed to grow from a dry mature seed up to the stage where the plant has produced dry mature seeds, similar to the starting material. This life cycle may be influenced by factors such as early vigour, growth rate, greenness index, flowering time and speed of seed maturation. The increase in growth rate may take place at one or more stages in the life cycle of a plant or during substantially the whole plant life cycle. Increased growth rate during the early stages in the life cycle of a plant may reflect enhanced and/or increased (early) vigour. The increase in growth rate may alter the harvest cycle of a plant allowing plants to be sown later and/or harvested sooner than would otherwise be possible (a similar effect may be obtained with earlier flowering time; delayed flowering is usually not a desired trait in crops). If the growth rate is sufficiently increased, it may allow for the further sowing of seeds of the same plant species (for example sowing and harvesting of rice plants followed by sowing and harvesting of further rice plants all within one conventional growing period). Similarly, if the growth rate is sufficiently increased, it may allow for the further sowing of seeds of different plants species (for example the sowing and harvesting of corn plants followed by, for example, the sowing and optional harvesting of soybean, potato or any other suitable plant). Harvesting additional times from the same rootstock in the case of some crop plants may also be possible. Altering the harvest cycle of a plant may lead to an increase in annual biomass production per acre (due to an increase in the number of times (say in a year) that any particular plant may be grown and harvested). An increase in growth rate may also allow for the cultivation of transgenic plants in a wider geographical area than their wild-type counterparts, since the territorial limitations for growing a crop are often determined by adverse environmental conditions either at the time of planting (early season) or at the time of harvesting (late season). Such adverse conditions may be avoided if the harvest cycle is shortened. The growth rate may be determined by deriving various parameters from growth curves, such parameters may be: T-Mid (the time taken for plants to reach 50% of their maximal size) and T-90 (time taken for plants to reach 90% of their maximal size), amongst others.

[0274] According to a preferred feature of the present invention, performance of the methods of the invention gives plants having an increased growth rate relative to control plants. Therefore, according to the present invention, there is provided a method for increasing the growth rate of plants, which method comprises increasing and/or modulating expression in a plant of a nucleic acid sequence encoding an ODC polypeptide, or a BIHD1 polypeptide, or a MYB30 polypeptide, or aTHOM polypeptide, or a BIHD2 polypeptide as defined herein.

[0275] An increase in yield and/or growth rate occurs whether the plant is under non-stress conditions or whether the plant is exposed to various stresses compared to control plants grown under comparable conditions. Plants typically respond to exposure to stress by growing more slowly. In conditions of severe stress, the plant may even stop growing altogether. Mild stress on the other hand is defined herein as being any stress to which a plant is exposed which does not result in the plant ceasing to grow altogether without the capacity to resume growth. Mild stress in the sense of the invention leads to a reduction in the growth of the stressed plants of less than 40%, 35% or 30%, preferably less than 25%, 20% or 15%, more preferably less than 14%, 13%, 12%, 11% or 10% or less in comparison to the control plant under non-stress conditions. Due to advances in agricultural practices (irrigation, fertilization, pesticide treatments) severe stresses are not often encountered in cultivated crop plants. As a consequence, the compromised growth induced by mild stress is often an undesirable feature for agriculture. Mild stresses are the everyday biotic and/or abiotic (environmental) stresses to which a plant is exposed. Abiotic stresses may be due to drought or excess water, anaerobic stress, salt stress, chemical toxicity, oxidative stress and hot, cold or freezing temperatures. The abiotic stress may be an osmotic stress caused by a water stress (particularly due to drought), salt stress, oxidative stress or an ionic stress. Biotic stresses are typically those stresses caused by pathogens, such as bacteria, viruses, fungi, nematodes, and insects. The term “non-stress” conditions as used herein are those environmental conditions that allow optimal growth of plants. Persons skilled in the art are aware of normal soil conditions and climatic conditions for a given location.

[0276] In particular, the methods of the present invention may be performed under non-stress conditions or under conditions of mild drought to give plants having increased yield relative to control plants. As reported in Wang et al. (Planta (2003) 218: 1-14), abiotic stress leads to a series of morphological, physiological, biochemical and molecular changes that adversely affect plant growth and productivity. Drought, salinity, extreme temperatures and oxidative stress are known to be interconnected and may induce growth and cellular damage through similar mechanisms. Rabbani et al. (Plant Physiol (2003) 133: 1755-1767) describes a particularly high degree of “cross talk” between drought stress and high-salinity stress. For example, drought and/or salinisation are manifested primarily as osmotic stress, resulting in the disruption of homeostasis and ion distribution in the cell. Oxidative stress, which frequently accompanies high or low temperature, salinity or drought stress, may cause denaturing of functional and structural proteins. As a consequence, these diverse environmental stresses often activate similar cell signalling pathways and cellular responses, such as the production of stress proteins, up-regulation of anti-oxidants, accumulation of compatible solutes and growth arrest. The term “non-stress” conditions as used herein are those environmental conditions that allow optimal growth of plants. Persons skilled in the art are aware of normal soil conditions and climatic conditions for a given location. Plants grown under optimal growth conditions, (grown under non-stress conditions) typically yield in increasing order of preference at least 97%, 95%, 92%, 90%, 87%, 85%, 83%, 80%, 77% or 75% of the average production of such plant in any given environment. Average production may be calculated on harvest and/or season basis. Persons skilled in the art are aware of average yield productions of a crop.

[0277] Concerning ODC sequences, performance of the methods of the invention gives plants grown under non-stress conditions or under mild drought conditions increased yield relative to control plants grown under comparable conditions. Therefore, according to the present invention, there is provided a method for increasing yield in plants grown under non-stress conditions or under mild drought conditions, which method comprises modulating expression in a plant of a nucleic acid encoding an ODC polypeptide.

[0278] Concerning BIHD1 sequences, performance of the methods of the invention gives plants grown under non-stress conditions or under mild stress conditions having increased yield-related traits, relative to control plants grown under comparable conditions. Therefore, according to the present invention, there is provided a method for increasing yield-related traits in plants grown under non-stress conditions or under mild stress conditions, which method comprises increasing expression in a plant of a nucleic acid sequence encoding a BIHD1 polypeptide.

[0279] Concerning MYB30 sequences, performance of the methods of the invention gives plants grown under non-stress conditions or under mild drought conditions increased yield relative to control plants grown under comparable conditions. Therefore, according to the present invention, there is provided a method for increasing yield in plants grown under non-stress conditions or under mild drought conditions, which method comprises modulating expression in a plant of a nucleic acid encoding a MYB30 polypeptide.

[0280] Concerning THOM sequences, performance of the methods of the invention gives plants grown under non-stress conditions or under mild drought conditions increased yield relative to control plants grown under comparable conditions. Therefore, according to the present invention, there is provided a method for increasing yield in plants grown under non-stress conditions or under mild drought conditions, which method comprises modulating expression in a plant of a nucleic acid encoding a THOM polypeptide.

[0281] Concerning BIHD2 sequences, performance of the methods of the invention gives plants grown under non-stress conditions or under mild stress conditions give them increased yield-related traits, relative to control plants grown under comparable conditions. Therefore, according to the present invention, there is provided a method for increasing yield-related traits in plants grown under non-stress conditions or under mild stress conditions, which method comprises increasing expression in a plant of a nucleic acid sequence encoding a BIHD2 polypeptide.

[0282] Concerning ODC sequences, performance of the methods of the invention gives plants grown under conditions of nutrient deficiency, particularly under conditions of nitrogen deficiency, increased yield relative to control plants grown under comparable conditions. Therefore, according to the present invention, there is provided a method for increasing yield in plants grown under conditions of nutrient deficiency, which method comprises modulating expression in a plant of a nucleic acid encoding an ODC polypeptide. Nutrient deficiency may result from a lack of nutrients such as nitrogen, phosphates and other phosphorous-containing compounds, potassium, calcium, cadmium, magnesium, manganese, iron and boron, amongst others.

[0283] Concerning BIHD1 sequences, performance of the methods according to the present invention results in plants grown under abiotic stress conditions having increased yield-related traits relative to control plants grown under comparable stress conditions. As reported in Wang et al. (Planta (2003) 218: 1-14), abiotic stress leads to a series of morphological, physiological, biochemical and molecular changes that adversely affect plant growth and productivity. Drought, salinity, extreme temperatures and oxidative stress are known to be interconnected and may induce growth and cellular damage through similar mechanisms. Rabbani et al. (Plant Physiol (2003) 133: 1755-1767) describes a particularly high degree of “cross talk” between drought stress and high-salinity stress. For example, drought and/or salinisation are manifested primarily as osmotic stress, resulting in the disruption of homeostasis and ion distribution in the cell. Oxidative stress, which frequently accompanies high or low temperature, salinity or drought stress, may cause denaturing of functional and structural proteins. As a consequence, these diverse environmental stresses often activate similar cell signalling pathways and cellular responses, such as the production of stress proteins, up-regulation of anti-oxidants, accumulation of compatible solutes and growth arrest. Since diverse environmental stresses activate similar pathways, the exemplification of the present invention with drought stress should not be seen as a limitation to drought stress, but more as a screen to indicate the involvement of BIHD1 polypeptides as defined above, in increasing yield-related traits relative to control plants grown in comparable stress conditions, in abiotic stresses in general.

[0284] Concerning BIHD1 sequences, performance of the methods of the invention gives plants having increased yield-related traits, under abiotic stress conditions relative to control plants grown in comparable stress conditions. Therefore, according to the present invention, there is provided a method for increasing yield-related traits, in plants grown under abiotic stress conditions, which method comprises increasing expression in a plant of a nucleic acid sequence encoding a BIHD1 polypeptide. According to one aspect of the invention, the abiotic stress is an osmotic stress, selected from one or more of the following: water stress, salt stress, oxidative stress and ionic stress.

[0285] The term “abiotic stress” as defined herein is taken to mean any one or more of: water stress (due to drought or excess water), anaerobic stress, salt stress, temperature stress (due to hot, cold or freezing temperatures), chemical toxicity stress and oxidative stress. According to one aspect of the invention, the abiotic stress is an osmotic stress, selected from water stress, salt stress, oxidative stress and ionic stress. Preferably, the water stress is drought stress. The term salt stress is not restricted to common salt (NaCl), but may be any stress caused by one or more of: NaCl, KCl, LiCl, MgCl₂, CaCl₂, amongst others.

[0286] Another example of abiotic environmental stress is the reduced availability of one or more nutrients that need to be assimilated by the plants for growth and development. Because of the strong influence of nutrition utilization efficiency on plant yield and product quality, a huge amount of fertilizer is poured onto fields to optimize plant growth and quality. Productivity of plants ordinarily is limited by three primary nutrients, phosphorous, potassium and nitrogen, which is usually the rate-limiting element in plant growth of these three. Therefore the major nutritional element required for plant growth is nitrogen (N). It is a constituent of numerous important compounds found in living cells, including amino acids, proteins (enzymes), nucleic acids, and chlorophyll. 1.5% to 2% of plant dry matter is nitrogen and approximately 16% of total plant protein. Thus, nitrogen availability is a major limiting factor for crop plant growth and production (Frink et al. (1999) Proc Natl Acad Sci USA 96(4): 1175-1180), and has as well a major impact on protein accumulation and amino acid composition. Therefore, of great interest are crop plants with increased yield-related traits, when grown under nitrogen-limiting conditions.

[0287] Performance of the methods of the invention gives plants grown under conditions of reduced nutrient availability, particularly under conditions of reduced nitrogen availablity, having increased yield-related traits relative to control plants grown under comparable conditions. Therefore, according to the present invention, there is provided a method for increasing yield-related traits in plants grown under conditions of reduced nutrient availablity, preferably reduced nitrogen availability, which method comprises increasing expression in a plant of a nucleic acid sequence encoding a BIHD1 polypeptide. Reduced nutrient availability may result from a deficiency or excess of nutrients such as nitrogen, phosphates and other phosphorous-containing compounds, potassium, calcium, cadmium, magnesium, manganese, iron and boron, amongst others. Preferably, reduced nutrient availablity is reduced nitrogen availability.

[0288] Concerning MYB30 sequences, performance of the methods of the invention gives plants grown under conditions of nutrient deficiency, particularly under conditions of nitrogen deficiency, increased yield relative to control plants grown under comparable conditions. Therefore, according to the present invention, there is provided a method for increasing yield in plants grown under conditions of nutrient deficiency, which method comprises modulating expression in a plant of a nucleic acid encoding a MYB30 polypeptide. Nutrient deficiency may result from a lack of nutrients such as nitrogen, phosphates and other phosphorous-containing compounds, potassium, calcium, cadmium, magnesium, manganese, iron and boron, amongst others.

[0289] Concerning THOM sequences, performance of the methods of the invention gives plants grown under conditions of nutrient deficiency, particularly under conditions of nitrogen deficiency, increased yield relative to control plants grown under comparable conditions. Therefore, according to the present invention, there is provided a method for increasing yield in plants grown under conditions of nutrient deficiency, which method comprises modulating expression in a plant of a nucleic acid encoding a THOM polypeptide. Nutrient deficiency may result from a lack of nutrients such as nitrogen, phosphates and other phosphorous-containing compounds, potassium, calcium, cadmium, magnesium, manganese, iron and boron, amongst others.

[0290] Performance of the methods of the invention gives plants grown under conditions of salt stress, increased yield relative to control plants grown under comparable conditions. Therefore, according to the present invention, there is provided a method for increasing yield in plants grown under conditions of salt stress, which method comprises modulating expression in a plant of a nucleic acid encoding a THOM polypeptide. The term salt stress is not restricted to common salt (NaCl), but may be any one or more of: NaCl, KCl, LiCl, MgCl₂, CaCl₂, amongst others.

[0291] Concerning BIHD2 sequences, performance of the methods according to the present invention results in plants grown under abiotic stress conditions having increased yield-related traits relative to control plants grown under comparable stress conditions. As reported in Wang et al. (Planta (2003) 218: 1-14), abiotic stress leads to a series of morphological, physiological, biochemical and molecular changes that adversely affect plant growth and productivity. Drought, salinity, extreme temperatures and oxidative stress are known to be interconnected and may induce growth and cellular damage through similar mechanisms. Rabbani et al. (Plant Physiol (2003) 133: 1755-1767) describes a particularly high degree of “cross talk” between drought stress and high-salinity stress. For example, drought and/or salinisation are manifested primarily as osmotic stress, resulting in the disruption of homeostasis and ion distribution in the cell. Oxidative stress, which frequently accompanies high or low temperature, salinity or drought stress, may cause denaturing of functional and structural proteins. As a consequence, these diverse environmental stresses often activate similar cell signalling pathways and cellular responses, such as the production of stress proteins, up-regulation of anti-oxidants, accumulation of compatible solutes and growth arrest. Since diverse environmental stresses activate similar pathways, the exemplification of the present invention with drought stress should not be seen as a limitation to drought stress, but more as a screen to indicate the involvement of BIHD2 polypeptides as defined above, in increasing yield-related traits relative to control plants grown in comparable stress conditions, in abiotic stresses in general.

[0292] Performance of the methods of the invention gives plants having increased yield-related traits, under abiotic stress conditions relative to control plants grown in comparable stress conditions. Therefore, according to the present invention, there is provided a method for increasing yield-related traits, in plants grown under abiotic stress conditions, which method comprises increasing expression in a plant of a nucleic acid sequence encoding a BIHD2 polypeptide. According to one aspect of the invention, the abiotic stress is an osmotic stress, selected from one or more of the following: water stress, salt stress, oxidative stress and ionic stress.

[0293] Another example of abiotic environmental stress is the reduced availability of one or more nutrients that need to be assimilated by the plants for growth and development. Because of the strong influence of nutrition utilization efficiency on plant yield and product quality, a huge amount of fertilizer is poured onto fields to optimize plant growth and quality. Productivity of plants ordinarily is limited by three primary nutrients, phosphorous, potassium and nitrogen, which is usually the rate-limiting element in plant growth of these three. Therefore the major nutritional element required for plant growth is nitrogen (N). It is a constituent of numerous important compounds found in living cells, including amino acids, proteins (enzymes), nucleic acids, and chlorophyll. 1.5% to 2% of plant dry matter is nitrogen and approximately 16% of total plant protein. Thus, nitrogen availability is a major limiting factor for crop plant growth and production (Frink et al. (1999) Proc Natl Acad Sci USA 96(4): 1175-1180), and has as well a major impact on protein accumulation and amino acid composition. Therefore, of great interest are crop plants with increased yield-related traits, when grown under nitrogen-limiting conditions.

[0294] Performance of the methods of the invention gives plants grown under conditions of reduced nutrient availability, particularly under conditions of reduced nitrogen availablity, having increased yield-related traits relative to control plants grown under comparable conditions. Therefore, according to the present invention, there is provided a method for increasing yield-related traits in plants grown under conditions of reduced nutrient availablity, preferably reduced nitrogen availability, which method comprises increasing expression in a plant of a nucleic acid sequence encoding a BIHD2 polypeptide. Reduced nutrient availability may result from a deficiency or excess of nutrients such as nitrogen, phosphates and other phosphorous-containing compounds, potassium, calcium, cadmium, magnesium, manganese, iron and boron, amongst others. Preferably, reduced nutrient availablity is reduced nitrogen availability.

[0295] The present invention encompasses plants or parts thereof (including seeds) or cells obtainable by the methods according to the present invention. The plants or parts thereof or cells comprise a nucleic acid transgene encoding an ODC polypeptide, or a BIHD1 polypeptide, a MYB30 polypeptide, or a THOM polypeptide, or a BIHD2 polypeptide as defined above.

[0296] The invention also provides genetic constructs and vectors to facilitate introduction and/or (increased) expression in plants of nucleic acids encoding ODC polypeptides, or BIHD1 polypeptides, or MYB30 polypeptides, or THOM polypeptides, or BIHD2 polypeptides as defined herein. The gene constructs may be inserted into vectors, which may be commercially available, suitable for transforming into plants and suitable for expression of the gene of interest in the transformed cells. The invention also provides use of a gene construct as defined herein in the methods of the invention.

[0297] More specifically, the present invention provides a construct comprising:
[0298] (a) a nucleic acid encoding an ODC polypeptide, or a BIHD1 polypeptide, or a MYB30 polypeptide, or a THOM polypeptide, or a BIHD2 polypeptide as defined above;
[0299] (b) one or more control sequences capable of driving expression of the nucleic acid sequence of (a); and optionally
[0300] (c) a transcription termination sequence.

[0301] Preferably, the nucleic acid encoding an ODC polypeptide, or a BIHD1 polypeptide, or a MYB30 polypeptide, or a THOM polypeptide, or a BIHD2 polypeptide is as defined above. The term “control sequence” and “termination sequence” are as defined herein.

[0302] Plants are transformed with a vector comprising any of the nucleic acids described above. The skilled artisan is well aware of the genetic elements that must be present on the vector in order to successfully transform, select and propagate host cells containing the sequence of interest. The sequence of interest is operably linked to one or more control sequences (at least to a promoter).

[0303] Plants are transformed with a vector comprising any of the nucleic acid sequences described above. The skilled artisan is well aware of the genetic elements that must be present on the vector in order to successfully transform, select and propagate host cells containing the sequence of interest. The sequence of interest is operably linked to one or more control sequences (at least to a promoter).

[0304] Other organ-specific promoters, for example for preferred expression in leaves, stems, tubers, meristems, seeds (embryo and/or endosperm), are useful in performing the methods of the invention. See the “Definitions” section herein for definitions of the various promoter types.

[0305] Advantageously, any type of promoter, whether natural or synthetic, may be used to drive and/or increase expression of the nucleic acid sequence, but preferably the promoter is of plant origin. A constitutive promoter is particularly useful in the methods. Preferably the constitutive promoter is also a ubiquitous promoter. See the “Definitions” section herein for definitions of the various promoter types. Also useful in the methods of the invention is a root-specific promoter.

[0306] Concerning BIHD1 sequences, preferably, one of the control sequences of a construct is a seed-specific promoter. An example of a seed-specific promoter is a WSI18 promoter, preferably a rice WSI18 promoter, more preferably a WSI18 promoter as represented by SEQ ID NO: 84. Another example of a seed-specific promoter is a RAB21 promoter, preferably a rice RAB21 promoter, more preferably a RAB21 promoter as represented by SEQ ID NO: 85. Further examples of seed-specific promoters can be found in the “Definitions” section hereinabove.

[0307] Advantageously, any type of promoter, whether natural or synthetic, may be used to drive expression of the nucleic acid sequence. See the “Definitions” section herein for definitions of the various promoter types. A young green tissue-specific promoter is particularly useful in the methods. Preferably, the nucleic acid sequence encoding a MYB30 polypetide is operably linked to a young green tissue-specific promoter as defined herein. The young green tissue-specific promoter is preferably a protochlorophyllide reductase (PcR) promoter, more preferably the protochlorophyllide reductase promoter represented by a nucleic acid sequence substantially similar to SEQ ID NO: 118, most preferably the promoter is as represented by SEQ ID NO: 118.

[0308] Concerning ODC sequences, it should be clear that the applicability of the present invention is not restricted to the ODC polypeptide-encoding nucleic acid represented by SEQ ID NO: 1, nor is the applicability of the invention restricted to expression of an ODC polypeptide-encoding nucleic acid when driven by a constitutive promoter.

[0309] The constitutive promoter is preferably a GOS2 promoter, preferably a GOS2 promoter from rice. Further preferably the constitutive promoter is represented by a nucleic acid sequence substantially similar to SEQ ID NO: 61, most preferably the constitutive promoter is as represented by SEQ ID NO: 61. See Table 2a in the “Definitions” section herein for further examples of constitutive promoters.

[0310] Concerning BIHD1 sequences, it should be clear that the applicability of the present invention is not restricted to a nucleic acid sequence encoding the BIHD1 polypeptide, as represented by SEQ ID NO: 66, nor is the applicability of the invention restricted to expression of a BIHD1 polypeptide-encoding nucleic acid sequence when driven by a seed-specific promoter.

[0311] Concerning MYB30 sequences, it should be clear that the applicability of the present invention is not restricted to the MYB30 polypeptide-encoding nucleic acid represented by SEQ ID NO: 88, nor is the applicability of the invention restricted to expression of a MYB30 polypeptide-encoding nucleic acid when driven by a green tissue-specific promoter.

[0312] Concerning THOM sequences, it should be clear that the applicability of the present invention is not restricted to the THOM polypeptide-encoding nucleic acid represented by SEQ ID NO: 122, nor is the applicability of the invention restricted to expression of a THOM polypeptide-encoding nucleic acid when driven by a constitutive promoter.

[0313] The constitutive promoter is preferably a medium strength promoter, more preferably selected from a plant derived promoter, such as a GOS2 promoter, more preferably is the promoter GOS2 promoter from rice. Further preferably the constitutive promoter is represented by a nucleic acid sequence substantially similar to SEQ ID NO: 131, most preferably the constitutive promoter is as represented by SEQ ID NO: 131. See the “Definitions” section herein for further examples of constitutive promoters.

[0314] Concerning BIHD2 sequences, it should be clear that the applicability of the present invention is not restricted to the BIHD2 polypeptide-encoding nucleic acid represented by SEQ ID NO: 192, nor is the applicability of the invention restricted to expression of a BIHD2 polypeptide-encoding nucleic acid when driven by a constitutive promoter.

[0315] The constitutive promoter is preferably a medium strength promoter, more preferably selected from a plant derived promoter, such as a GOS2 promoter, more preferably is the promoter GOS2 promoter from rice. Further preferably the constitutive promoter is represented by a nucleic acid sequence substantially similar to SEQ ID NO: 248, most preferably the constitutive promoter is as represented by SEQ ID NO: 248. See the “Definitions” section herein for further examples of constitutive promoters.

[0316] Plants are transformed with a vector comprising any of the nucleic acid sequences described above. The skilled artisan is well aware of the genetic elements that must be present on the vector in order to successfully transform, select and propagate host cells containing the sequence of interest. The sequence of interest is operably linked to one or more control sequences (at least to a promoter).

[0317] Concerning BIHD2 sequences, it should also be clear that the applicability of the present invention is not restricted to a nucleic acid sequence encoding the BIHD2 polypeptide, as represented by SEQ ID NO: 192, nor is the applicability of the invention restricted to expression of a BIHD2 polypeptide-encoding nucleic acid sequence when driven by a seed-specific promoter.

[0318] Optionally, one or more terminator sequences may be used in the construct introduced into a plant. Additional regulatory elements may include transcriptional as well as translational increasers. Those skilled in the art will be aware of terminator and enhancer (or increaser) sequences that may be suitable for use in performing the invention. An intron sequence may also be added to the 5′ untranslated region (UTR) or in the coding sequence to increase the amount of the mature message that accumulates in the cytosol, as described in the definitions section. Other control sequences (besides promoter, increaser, silencer, intron sequences, 3′UTR and/or 5′UTR regions) may be protein and/or RNA stabilizing elements. Such sequences would be known or may readily be obtained by a person skilled in the art.

[0319] The genetic constructs of the invention may further include an origin of replication sequence that is required for maintenance and/or replication in a specific cell type. One example is when a genetic construct is required to be maintained in a bacterial cell as an episomal genetic element (e.g. plasmid or cosmid molecule). Preferred origins of replication include, but are not limited to, the f1-ori and colE1.

[0320] For the detection of the successful transfer of the nucleic acid sequences as used in the methods of the invention and/or selection of transgenic plants comprising these nucleic acid sequences, it is advantageous to use marker genes (or reporter genes). Therefore, the genetic construct may optionally comprise a selectable marker gene. Selectable markers are described in more detail in the “definitions” section herein. The marker genes may be removed or excised from the transgenic cell once they are no longer needed. Techniques for marker removal are known in the art, useful techniques are described above in the “definitions” section.

[0321] It is known that upon stable or transient integration of nucleic acid sequences into plant cells, only a minority of the cells takes up the foreign DNA and, if desired, integrates it into its genome, depending on the expression vector used and the transfection technique used. To identify and select these integrants, a gene coding for a selectable marker (such as the ones described above) is usually introduced into the host cells together with the gene of interest. These markers can for example be used in mutants in which these genes are not functional by, for example, deletion by conventional methods. Furthermore, nucleic acid sequence molecules encoding a selectable marker can be introduced into a host cell on the same vector that comprises the sequence encoding the polypeptides of the invention or used in the methods of the invention, or else in a separate vector. Cells which have been stably transfected with the introduced nucleic acid sequence can be identified for example by selection (for example, cells which have integrated the selectable marker survive whereas the other cells die). The marker genes may be removed or excised from the transgenic cell once they are no longer needed. Techniques for marker gene removal are known in the art, useful techniques are described above in the definitions section.

[0322] The invention also provides a method for the production of transgenic plants having enhanced yield-related traits relative to control plants, comprising introduction and expression in a plant of any nucleic acid sequence encoding an ODC polypeptide, or a BIHD1 polypeptide, or a MYB30 polypeptide, or a THOM polypeptide, or a BIHD2 polypeptide as defined hereinabove.

[0323] More specifically, the present invention provides a method for the production of transgenic plants having enhanced and/or increased yield-related traits, particularly increased (seed) yield, which method comprises:
[0324] (i) introducing and expressing in a plant, or plant part, or plant cell a nucleic acid encoding an ODC polypeptide, or a BIHD1 polypeptide, or a MYB30 polypeptide, or a THOM polypeptide, or a BIHD2 polypeptide; and
[0325] (ii) cultivating the plant cell under conditions promoting plant growth and development.

[0326] The nucleic acid sequence of (i) may be any of the nucleic acid sequences capable of encoding an ODC polypeptide, or a BIHD1 polypeptide, or a MYB30 polypeptide, or a THOM polypeptide, or a BIHD2 polypeptide as defined herein.

[0327] The nucleic acid sequence may be introduced directly into a plant cell or into the plant itself (including introduction into a tissue, organ or any other part of a plant). According to a preferred feature of the present invention, the nucleic acid is preferably introduced into a plant by transformation. The term “transformation” is described in more detail in the “definitions” section herein.

[0328] The genetically modified plant cells can be regenerated via all methods with which the skilled worker is familiar. Suitable methods can be found in the abovementioned publications by S. D. Kung and R. Wu, Potrykus or Hofgen and Willmitzer.

[0329] Generally after transformation, plant cells or cell groupings are selected for the presence of one or more markers which are encoded by plant-expressible genes co-transferred with the gene of interest, following which the transformed material is regenerated into a whole plant. To select transformed plants, the plant material obtained in the transformation is, as a rule, subjected to selective conditions so that transformed plants can be distinguished from untransformed plants. For example, the seeds obtained in the above-described manner can be planted and, after an initial growing period, subjected to a suitable selection by spraying. A further possibility consists in growing the seeds, if appropriate after sterilization, on agar plates using a suitable selection agent so that only the transformed seeds can grow into plants. Alternatively, the transformed plants are screened for the presence of a selectable marker such as the ones described above.

[0330] Following DNA transfer and regeneration, putatively transformed plants may also be evaluated, for instance using Southern analysis, for the presence of the gene of interest, copy number and/or genomic organisation. Alternatively or additionally, expression levels of the newly introduced DNA may be monitored using Northern and/or Western analysis, both techniques being well known to persons having ordinary skill in the art.

[0331] The generated transformed plants may be propagated by a variety of means, such as by clonal propagation or classical breeding techniques. For example, a first generation (or T1) transformed plant may be selfed and homozygous second-generation (or T2) transformants selected, and the T2 plants may then further be propagated through classical breeding techniques. The generated transformed organisms may take a variety of forms. For example, they may be chimeras of transformed cells and non-transformed cells; clonal transformants (e.g., all cells transformed to contain the expression cassette); grafts of transformed and untransformed tissues (e.g., in plants, a transformed rootstock grafted to an untransformed scion).

[0332] The present invention clearly extends to any plant cell or plant produced by any of the methods described herein, and to all plant parts and propagules thereof. The present invention extends further to encompass the progeny of a primary transformed or transfected cell, tissue, organ or whole plant that has been produced by any of the aforementioned methods, the only requirement being that progeny exhibit the same genotypic and/or phenotypic characteristic(s) as those produced by the parent in the methods according to the invention.

[0333] The invention also includes host cells containing an isolated nucleic acid sequence encoding an ODC polypeptide, or a BIHD1 polypeptide, or a MYB30 polypeptide, or a THOM polypeptide, or a BIHD2 polypeptide as defined hereinabove. Preferred host cells according to the invention are plant cells. Host plants for the nucleic acids or the vector used in the method according to the invention, the expression cassette or construct or vector are, in principle, advantageously all plants, which are capable of synthesizing the polypeptides used in the inventive method.

[0334] The methods of the invention are advantageously applicable to any plant. Plants that are particularly useful in the methods of the invention include all plants which belong to the superfamily Viridiplantae, in particular monocotyledonous and dicotyledonous plants including fodder or forage legumes, ornamental plants, food crops, trees or shrubs. According to a preferred embodiment of the present invention, the plant is a crop plant. Examples of crop plants include soybean, sunflower, canola, alfalfa, rapeseed, linseed, cotton, tomato, potato and tobacco. Further preferably, the plant is a monocotyledonous plant. Examples of monocotyledonous plants include sugarcane. More preferably the plant is a cereal. Examples of cereals include rice, maize, wheat, barley, millet, rye, triticale, sorghum, emmer, spelt, secale, einkorn, teff, milo and oats.

[0335] The invention also extends to harvestable parts of a plant comprising an isolated nucleic acid sequence encoding an ODC polypeptide, or a BIHD1 polypeptide, or a THOM polypeptide, or a BIHD2 polypeptide (as defined hereinabove). Such harvestable parts include, but are not limited to seeds, leaves, fruits, flowers, stems, roots, rhizomes, tubers and bulbs. The invention furthermore relates to products derived, preferably directly derived, from a harvestable part of such a plant, such as dry pellets or powders, oil, fat and fatty acids, starch or proteins.

[0336] According to a preferred feature of the invention, the modulated expression is increased expression. Methods for increasing expression of nucleic acids or genes, or gene products, are well documented in the art and examples are provided in the definitions section.

[0337] As mentioned above, a preferred method for modulating expression of a nucleic acid sequence encoding an ODC polypeptide, or a BIHD1 polypeptide, or a MYB30 polypeptide, or a THOM polypeptide, or a BIHD2 polypeptide is by introducing and expressing in a plant a nucleic acid sequence encoding an ODC polypeptide or a BIHD1 polypeptide, or a MYB30 polypeptide, or a THOM polypeptide, or a BIHD2 polypeptide; however the effects of performing the method, i.e. enhancing yield-related traits may also be achieved using other well known techniques, including but not limited to T-DNA activation tagging, TILLING, homologous recombination. A description of these techniques is provided in the definitions section.

[0338] The present invention also encompasses use of nucleic acids sequences encoding ODC polypeptides, or MYB30 polypeptides, or THOM polypeptides as described herein and use of these ODC polypeptides, or MYB30 polypeptides, or THOM polypeptides in enhancing any of the aforementioned yield-related traits in plants.

[0339] Furthermore, the present invention also encompasses use of nucleic acid sequences encoding BIHD1 polypeptides, or BIHD2 polypeptides as described herein and use of these BIHD1 polypeptides, or BIHD2 polypeptides in increasing any of the aforementioned yield-related traits in plants, under normal growth conditions, under abiotic stress growth (preferably osmotic stress growth conditions) conditions, and under growth conditions of reduced nutrient availability, preferably under conditions of reduced nitrogen availability.

[0340] Concerning ODC sequences, nucleic acids sequences encoding ODC polypeptide described herein, or the ODC polypeptides themselves, may find use in breeding programmes in which a DNA marker is identified which may be genetically linked to an ODC polypeptide-encoding gene. The nucleic acids/genes, or the ODC polypeptides themselves may be used to define a molecular marker. This DNA or protein marker may then be used in breeding programmes to select plants having enhanced yield-related traits as defined hereinabove in the methods of the invention.

[0341] Concerning BIHD1 sequences, nucleic acid sequences encoding BIHD1 polypeptides described herein, or the BIHD1 polypeptides themselves, may find use in breeding programmes in which a DNA marker is identified that may be genetically linked to a BIHD1 polypeptide-encoding gene. The genes/nucleic acid sequences, or the BIHD1 polypeptides themselves may be used to define a molecular marker. This DNA or protein marker may then be used in breeding programmes to select plants having increased yield-related traits, as defined hereinabove in the methods of the invention.

[0342] Concerning MYB30 sequences, nucleic acids sequences encoding MYB30 polypeptides described herein, or the MYB30 polypeptides themselves, may find use in breeding programmes in which a DNA marker is identified which may be genetically linked to a MYB30 polypeptide-encoding gene. The nucleic acids/genes, or the MYB30 polypeptides themselves may be used to define a molecular marker. This DNA or protein marker may then be used in breeding programmes to select plants having enhanced yield-related traits as defined hereinabove in the methods of the invention.

[0343] Concerning THOM sequences, nucleic acids encoding THOM polypeptide described herein, or the THOM polypeptides themselves, may find use in breeding programmes in which a DNA marker is identified which may be genetically linked to a THOM polypeptide-encoding gene. The nucleic acids/genes, or the THOM polypeptides themselves may be used to define a molecular marker. This DNA or protein marker may then be used in breeding programmes to select plants having enhanced yield-related traits as defined hereinabove in the methods of the invention.

[0344] Concerning BIHD2 sequence, nucleic acid sequences encoding BIHD2 polypeptides described herein, or the BIHD2 polypeptides themselves, may find use in breeding programmes in which a DNA marker is identified that may be genetically linked to a BIHD2 polypeptide-encoding gene. The genes/nucleic acid sequences, or the BIHD2 polypeptides themselves may be used to define a molecular marker. This DNA or protein marker may then be used in breeding programmes to select plants having increased yield-related traits, as defined hereinabove in the methods of the invention.

[0345] Allelic variants of a gene/nucleic acid sequence encoding an ODC polypeptide, or a BIHD1 polypeptide, or a MYB30 polypeptide, or a THOM polypeptide, or a BIHD2 polypeptide may also find use in marker-assisted breeding programmes. Such breeding programmes sometimes require introduction of allelic variation by mutagenic treatment of the plants, using for example EMS mutagenesis; alternatively, the programme may start with a collection of allelic variants of so called “natural” origin caused unintentionally. Identification of allelic variants then takes place, for example, by PCR. This is followed by a step for selection of superior allelic variants of the sequence in question and which give increased yield. Selection is typically carried out by monitoring growth performance of plants containing different allelic variants of the sequence in question. Growth performance may be monitored in a greenhouse or in the field. Further optional steps include crossing plants in which the superior allelic variant was identified with another plant. This could be used, for example, to make a combination of interesting phenotypic features.

[0346] Nucleic acids sequences encoding ODC polypeptides, or BIHD1 polypeptides, or MYB30 polypeptides, or THOM polypeptides, or BIHD2 polypeptides may also be used as probes for genetically and physically mapping the genes that they are a part of, and as markers for traits linked to those genes. Such information may be useful in plant breeding in order to develop lines with desired phenotypes. Such use of nucleic acid sequences encoding an ODC polypeptide, or a BIHD polypeptide, or a MYB30 polypeptide, or a THOM polypeptide, or a BIHD2 polypeptide requires only a nucleic acid sequence of at least 15 nucleotides in length. The nucleic acid sequences encoding an ODC polypeptide, or a BIHD1 polypeptide, or a MYB30 polypeptide, or a THOM polypeptide, or a BIHD2 polypeptide may be used as restriction fragment length polymorphism (RFLP) markers. Southern blots (Sambrook J, Fritsch E F and Maniatis T (1989) Molecular Cloning, A Laboratory Manual) of restriction-digested plant genomic DNA may be probed with the nucleic acid sequences encoding an ODC polypeptide, or a BIHD1 polypeptide, or a MYB30 polypeptide, or a THOM polypeptide, or a BIHD2 polypeptide. The resulting banding patterns may then be subjected to genetic analyses using computer programs such as MapMaker (Lander et al. (1987) Genomics 1: 174-181) in order to construct a genetic map. In addition, the nucleic acid sequences may be used to probe Southern blots containing restriction endonuclease-treated genomic DNAs of a set of individuals representing parent and progeny of a defined genetic cross. Segregation of the DNA polymorphisms is noted and used to calculate the position of the nucleic acid sequence encoding an ODC polypeptide, a BIHD1 polypeptide, or a MYB30 polypeptide, or a BIHD2 polypeptide in the genetic map previously obtained using this population (Botstein et al. (1980) Am. J. Hum. Genet. 32:314-331).

[0347] The production and use of plant gene-derived probes for use in genetic mapping is described in Bernatzky and Tanksley (1986) Plant Mol. Biol. Reporter 4: 37-41. Numerous publications describe genetic mapping of specific cDNA clones using the methodology outlined above or variations thereof. For example, F2 intercross populations, backcross populations, randomly mated populations, near isogenic lines, and other sets of individuals may be used for mapping. Such methodologies are well known to those skilled in the art.

[0348] The nucleic acid sequence probes may also be used for physical mapping (i.e., placement of sequences on physical maps; see Hoheisel et al. In: Non-mammalian Genomic Analysis: A Practical Guide, Academic press 1996, pp. 319-346, and references cited therein).

[0349] In another embodiment, the nucleic acid probes may be used in direct fluorescence in situ hybridisation (FISH) mapping (Trask (1991) Trends Genet. 7:149-154). Although current methods of FISH mapping favour use of large clones (several kb to several hundred kb; see Laan et al. (1995) Genome Res. 5:13-20), improvements in sensitivity may allow performance of FISH mapping using shorter probes.

[0350] A variety of nucleic acid sequence amplification-based methods for genetic and physical mapping may be carried out using the nucleic acid sequences. Examples include allele-specific amplification (Kazazian (1989) J. Lab. Clin. Med. 11:95-96), polymorphism of PCR-amplified fragments (CAPS; Sheffield et al. (1993) Genomics 16:325-332), allele-specific ligation (Landegren et al. (1988) Science 241:1077-1080), nucleotide extension reactions (Sokolov (1990) Nucleic Acid Res. 18:3671), Radiation Hybrid Mapping (Walter et al. (1997) Nat. Genet. 7:22-28) and Happy Mapping (Dear and Cook (1989) Nucleic Acid Res. 17:6795-6807). For these methods, the sequence of a nucleic acid is used to design and produce primer pairs for use in the amplification reaction or in primer extension reactions.

[0351] The design of such primers is well known to those skilled in the art. In methods employing PCR-based genetic mapping, it may be necessary to identify DNA sequence differences between the parents of the mapping cross in the region corresponding to the instant nucleic acid sequence. This, however, is generally not necessary for mapping methods.

[0352] The methods according to the present invention result in plants having enhanded and/or increased yield-related traits, as described hereinbefore. These traits may also be combined with other economically advantageous traits, such as further yield-enhancing and/or yield-increasing traits, tolerance to abiotic and biotic stresses, tolerance to herbicides, insectides, traits modifying various architectural features and/or biochemical and/or physiological features.

### Items

[0353] 1. A method for enhancing yield-related traits in plants relative to control plants, comprising modulating expression in a plant of a nucleic acid encoding an Ornithine Decarboxylase polypeptide and optionally selecting for plants having enhanced yield-related traits.
[0354] 2. Method according to item 1, wherein said Ornithine decarboxylase polypeptide, when used in the construction of a phylogenetic tree of alpha/beta-barrel fold basic amino acid decarboxylase polypeptides, clusters with the clades comprising Ornithine Decarboxylase rather than Arginine Decarboxylase, Diaminopimelate Decarboxylase, or Carboxynorspermidine Decarboxylase polypeptides.
[0355] 3. Method according to item 1 or 2, wherein said Ornithine Decarboxylase polypeptide comprises one or more of the following sequences:
   [0356] (i) 30%, 35%, 40%, 45%, 50%, 55%, 60%, 65%, 70%, 75%, 80%, 85%, 90%, 95%, 96%, 97%, 98%, 99% or more sequence identity to the amino acid sequence of any of the polypeptides of Table A1
   [0357] (ii) 50%, 55%, 60%, 65%, 70%, 75%, 80%, 85%, 90%, 95%, 96%, 97%, 98%, 99% or more sequence identity to the amino acid sequence of any of the domains as set forth in Table C1 of Example 4.
   [0358] (iii) 50%, 55%, 60%, 65%, 70%, 75%, 80%, 85%, 90%, 95%, 96%, 97%, 98%, 99% or more sequence identity to the amino acid sequence of Motif 1: [N/G]AR[C/V]P[L/M][G/S][P/L]K[Y/F]GALPE E[V/A]EPLL[R/Q][A/T]A[Q/K][A/E][A/L ][G/R]LTV[S/V]GVSFH[V/I]GSG (SEQ ID NO: 51);
   [0359] (iv) 50%, 55%, 60%, 65%, 70%, 75%, 80%, 85%, 90%, 95%, 96%, 97%, 98%, 99% or more sequence identity to the amino acid sequence of Motif 2: [K/D][D/Q][P/A]FYV[L/V]DL[G/A][E/V]VV[S/R]LMDQW[R/K/N][A/S] (SEQ ID NO: 52);
   [0360] (v) 50%, 55%, 60%, 65%, 70%, 75%, 80%, 85%, 90%, 95%, 96%, 97%, 98%, 99% or more sequence identity to the amino acid sequence of Motif 3: RI[V/I][F/Y]ANPCK[P/R]ES[D/H]I[I/K/R][Y/F]AA[K/S]VGVNLTT[Y/F]DSEDE[V/L][Y/E]K[I/V][R/A/K]KHHP (SEQ ID NO: 53);
   [0361] (vi) 50%, 55%, 60%, 65%, 70%, 75%, 80%, 85%, 90%, 95%, 96%, 97%, 98%, 99% or more sequence identity to the amino acid sequence of Motif 4: EY[W/Y]I[N/D]DG[L/V/I]YGS[F/M/L]NC[I/V]L[Y/F]DHAT (SEQ ID NO: 54);
   [0362] (vii) 50%, 55%, 60%, 65%, 70%, 75%, 80%, 85%, 90%, 95%, 96%, 97%, 98%, 99% or more sequence identity to the amino acid sequence of Motif 5: EYVLSLG[V/I]SPD (SEQ ID NO: 55);
   [0363] (viii) 50%, 55%, 60%, 65%, 70%, 75%, 80%, 85%, 90%, 95%, 96%, 97%, 98%, 99% or more sequence identity to the amino acid sequence of Motif 6: AI[A/E]AA[K/R]EVF[E/D][T/A]A[A/S][K/Q/R][L/F]G[M/UP/S][K/R/P]M[T/R]VL[D/N][I/V]GGGFT[S/A]G[H/P]QF[T/E][T/E]AA[AN][A/K/V][V/I][K/N][S/A] (SEQ ID NO: 56);
   [0364] (ix) 50%, 55%, 60%, 65%, 70%, 75%, 80%, 85%, 90%, 95%, 96%, 97%, 98%, 99% or more sequence identity to the amino acid sequence of Motif 7: [G/I]G[G/A]AP[P/T/V]AAAA[A/E][EN][N/D/G][G/H]TRKV[V/I]PLS[R/K]DALQDFM[V/L]SIITQKLQD[E/D] (SEQ ID NO: 57);
   [0365] (x) 50%, 55%, 60%, 65%, 70%, 75%, 80%, 85%, 90%, 95%, 96%, 97%, 98%, 99% or more sequence identity to the amino acid sequence of Motif 8: QT[V/I]IVSGLNPAAILQ (SEQ ID NO: 58).
[0366] 4. Method according to item 1, 2 or 3, wherein said modulated expression is effected by introducing and expressing in a plant a nucleic acid encoding an Ornithine Decarboxylase polypeptide.
[0367] 5. Method according to any preceding item, wherein said nucleic acid encoding an Ornithine Decarboxylase polypeptide encodes any one of the proteins listed in Table A1 or is a portion of such a nucleic acid, or a nucleic acid capable of hybridising with such a nucleic acid or the complement thereof.
[0368] 6. Method according to any preceding item, wherein said nucleic acid sequence encodes an orthologue or paralogue of any of the proteins given in Table A1.
[0369] 7. Method according to any preceding item, wherein said enhanced yield-related traits comprise increased shoot biomass and/or seed yield relative to control plants.
[0370] 8. Method according to any preceding item wherein said enhanced yield-related traits are obtained under cultivation conditions of nitrogen deficiency.
[0371] 9. Method according to any one of items 4 to 8, wherein said nucleic acid is operably linked to a constitutive promoter, preferably to a GOS2 promoter, most preferably to a GOS2 promoter from rice.
[0372] 10. Method according to any preceding item, wherein said nucleic acid encoding an Ornithine Decarboxylase polypeptide is of plant origin, preferably from a dicotyledonous plant, further preferably from the family Solanaceae, most preferably from Nicotiana tabacum.
[0373] 11. Plant or part thereof, including seeds, obtainable by a method according to any preceeding item, wherein said plant or part thereof comprises a recombinant nucleic acid encoding an Ornithine Decarboxylase polypeptide.
[0374] 12. Construct comprising:
   [0375] (i) nucleic acid encoding an Ornithine Decarboxylase polypeptide as defined in items 1, 2 or 3;
   [0376] (ii) one or more control sequences capable of driving expression of the nucleic acid sequence of (a); and optionally
   [0377] (iii) a transcription termination sequence.
[0378] 13. Construct according to item 12, wherein one of said control sequences is a constitutive promoter, preferably a GOS2 promoter, most preferably a GOS2 promoter from rice.
[0379] 14. Use of a construct according to item 12 or 13 in a method for making plants having increased yield, particularly increased seed yield relative to control plants.
[0380] 15. Plant, plant part or plant cell transformed with a construct according to item 12 or 13.
[0381] 16. Method for the production of a transgenic plant having increased yield, preferably increased seed yield relative to control plants, comprising:
   [0382] (i) introducing and expressing in a plant a nucleic acid encoding an Ornithine Decarboxylase polypeptide as defined in item 1, 2 or 3; and
   [0383] (ii) cultivating the plant cell under conditions promoting plant growth and development; and optionally
   [0384] (iii) selecting for plants having enhanced yield-related traits
[0385] 17. Transgenic plant having increased yield, particularly increased biomass, relative to control plants, resulting from modulated expression of a nucleic acid encoding an Ornithine Decarboxylase polypeptide as defined in item 1, 2 or 3 or a transgenic plant cell derived from said transgenic plant.
[0386] 18. Transgenic plant according to item 11, 15 or 17, or a transgenic plant cell derived therefrom, wherein said plant is a crop plant or a monocot or a cereal, such as rice, maize, wheat, barley, millet, rye, triticale, sorghum and oats.
[0387] 19. Harvestable parts of a plant according to item 18, wherein said harvestable parts are preferably shoot biomass and/or seeds.
[0388] 20. Products derived from a plant according to item 18 and/or from harvestable parts of a plant according to item 19.
[0389] 21. Use of a nucleic acid encoding an Ornithine Decarboxylase polypeptide in increasing yield, particularly in increasing shoot and/or biomass in plants, relative to control plants.
[0390] 22. A method for increasing yield-related traits in plants relative to control plants, comprising increasing expression in a plant of a nucleic acid sequence encoding a benzothiadiazole-induced homeodomain 1 (BIHD1) polypeptide, which BIHD1 polypeptide has in increasing order of preference at least 50%, 55%, 60%, 65%, 70%, 75%, 80%, 85%, 90%, 95%, 98%, 99% or more amino acid sequence identity to a BIHD1 polypeptide as represented by SEQ ID NO: 67, and optionally selecting for plants having increased yield-related traits.
[0391] 23. Method according to item 22, wherein said BIHD1 polypeptide comprises: (i) a homeobox domain with an InterPro accession IPRO001356; (ii) a POX domain with an InterPro accession IPRO06563; and (ii) at least one predicted coiled coil domain.
[0392] 24. Method according to item 22 or 23, wherein said BIHD1 polypeptide, when used in the construction of a BIHD1 phylogenetic tree, such as the one depicted in FIG. 4, clusters with the clade of BELL-1 homeodomain polypeptides rather than with any other homeodomain poypeptide clade.
[0393] 25. Method according to any one of the items 22 to 24, wherein said BIHD1 polypeptide has in increasing order of preference at least 50%, 55%, 60%, 65%, 70%, 75%, 80%, 85%, 90%, 95%, 98%, 99% or more amino acid sequence identity to any of the polypeptide sequences given in Table A2 herein.
[0394] 26. Method according to any one of the items 22 to 25, wherein said nucleic acid sequence encoding a BIHD1 polypeptide is represented by any one of the nucleic acid sequence SEQ ID NOs given in Table A2 or a portion thereof, or a sequence capable of hybridising with any one of the nucleic acid sequences SEQ ID NOs given in Table A2.
[0395] 27. Method according to any one of the items 22 to 26, wherein said nucleic acid sequence encodes an orthologue or paralogue of any of the polypeptide sequence SEQ ID NOs given in Table A2.
[0396] 28. Method according to any one of the items 22 to 27, wherein said increased expression is effected by any one or more of: T-DNA activation tagging, TILLING, or homologous recombination.
[0397] 29. Method according to any one of the items 22 to 28, wherein said increased expression is effected by introducing and expressing in a plant a nucleic acid sequence encoding a BIHD1 polypeptide.
[0398] 30. Method according to any one of the items 22 to 29, wherein said increased yield-related trait is one or more of: increased early vigour, increased total seed yield per plant, increased number of filled seeds, increased total number of seeds, or increased harvest index.
[0399] 31. Method according to any one of the items 22 to 30, wherein said nucleic acid sequence is operably linked to a seed-specific promoter.
[0400] 32. Method according to item 31, wherein said seed-specific promoter is preferably a WSI18 promoter, more preferably to a WSI18 promoter from rice, most preferably a WSI19 promoter as represented by SEQ ID NO: 84.
[0401] 33. Method according to item 31, wherein said seed-specific promoter is preferably a RAB21 promoter, more preferably to a RAB21 promoter from rice, most preferably a RAB21 promoter as represented by SEQ ID NO: 85.
[0402] 34. Method according to any one of the items 22 to 33, wherein said nucleic acid sequence encoding a BIHD1 polypeptide is of plant origin, preferably from a monocotyledonous plant, further preferably from the family Poacae, more preferably from the genus Oryza, most preferably from Oryza sativa.
[0403] 35. Plants, parts thereof (including seeds), or plant cells obtainable by a method according to any preceding item, wherein said plant, part or cell thereof comprises an isolated nucleic acid transgene encoding a BIHD1 polypeptide operably linked to a seed-specific promoter.
[0404] 36. Construct comprising:
   [0405] (a) A nucleic acid sequence encoding a BIHD1 polypeptide as defined in any one of item 22 to 27;
   [0406] (b) one or more control sequences capable of driving expression of the nucleic acid sequence of (a); and optionally
   [0407] (c) a transcription termination sequence.
[0408] 37. Construct according to item 36, wherein said control sequence is seed-specific promoter.
[0409] 38. Use of a construct according to item 36 or 37 in a method for making plants having increased yield-related traits relative to control plants, which increased yield-related traits are one or more of: increased early vigour, increased total seed yield per plant, increased number of filled seeds, increased total number of seeds, or increased harvest index.
[0410] 39. Plant, plant part or plant cell transformed with a construct according to item 36 or 37.
[0411] 40. Method for the production of transgenic plants having increased yield-related traits relative to control plants, comprising:
   [0412] (i) introducing and expressing in a plant, plant part, or plant cell, a nucleic acid sequence encoding a BIHD1 polypeptide as defined in any one of item 22 to 27; and
   [0413] (ii) cultivating the plant cell, plant part, or plant under conditions promoting plant growth and development.
[0414] 41. Transgenic plant having increased yield-related traits relative to control plants, resulting from increased expression of a nucleic acid sequence encoding a BIHD1 polypeptide as defined in any one of item 22 to 27, operably linked to a seed-specific promoter, or a transgenic plant cell or transgenic plant part derived from said transgenic plant.
[0415] 42. Transgenic plant according to item 35, 39 or 41, wherein said plant is a crop plant or a monocot or a cereal, such as rice, maize, wheat, barley, millet, rye, triticale, sorghum and oats, or a transgenic plant cell derived from said transgenic plant.
[0416] 43. Harvestable parts comprising an isolated nucleic acid sequence encoding a BIHD1 polypeptide, of a plant according to item 42, wherein said harvestable parts are preferably seeds.
[0417] 44. Products comprising an isolated nucleic acid sequence encoding a BIHD1 polypeptide derived, from a plant according to item 42 and/or from harvestable parts of a plant according to item 43.
[0418] 45. Use of a nucleic acid sequence encoding a BIHD1 polypeptide as defined in any one of item 22 to 27 in increasing yield-related traits, comprising one or more of: increased early vigour, increased total seed yield per plant, increased number of filled seeds, increased total number of seeds, or increased harvest index.
[0419] 46. A method for enhancing yield-related traits in plants relative to control plants, comprising modulating expression in a plant of a nucleic acid encoding a MYB30 polypeptide, wherein said MYB30 polypeptide comprises at least one SANT domain.
[0420] 47. Method according to item 46, wherein said MYB30 polypeptide comprises one or more of the motifs 9 to 11 (SEQ ID NO: 119 to SEQ ID NO: 121).
[0421] 48. Method according to item 46 or 47, wherein said modulated expression is effected by introducing and expressing in a plant a nucleic acid encoding a MYB30 polypeptide.
[0422] 49. Method according to any one of items 46 to 48, wherein said nucleic acid encoding a MYB30 polypeptide encodes any one of the proteins listed in Table A3 or is a portion of such a nucleic acid, or a nucleic acid capable of hybridising with such a nucleic acid.
[0423] 50. Method according to any one of items 46 to 49, wherein said nucleic acid sequence encodes an orthologue or paralogue of any of the proteins given in Table A3.
[0424] 51. Method according to any one of items 46 to 50, wherein said enhanced yield-related traits comprise increased increased biomass and/or increased emergence vigour relative to control plants.
[0425] 52. Method according to any one of items 46 to 51, wherein said enhanced yield-related traits are obtained under non-stress conditions.
[0426] 53. Method according to any one of items 48 to 52, wherein said nucleic acid is operably linked to a green tissue-specific promoter, preferably to a pPcR promoter, most preferably to a pPcR promoter from rice.
[0427] 54. Method according to any one of items 46 to 53, wherein said nucleic acid encoding a MYB30 polypeptide is of plant origin, preferably from a dicotyledonous plant, further preferably from the family Brassicaceae, more preferably from the genus Arabidopsis, most preferably from Arabidopsis thaliana.
[0428] 55. Plant or part thereof, including seeds, obtainable by a method according to any preceding item, wherein said plant or part thereof comprises a recombinant nucleic acid encoding a MYB30 polypeptide.
[0429] 56. Construct comprising:
   [0430] (i) nucleic acid encoding a class MYB30 polypeptide as defined in items 46 or 47;
   [0431] (ii) one or more control sequences capable of driving expression of the nucleic acid sequence of (a); and optionally
   [0432] (iii) a transcription termination sequence.
[0433] 57. Construct according to item 56, wherein one of said control sequences is a green tissue-specific promoter, preferably a pPcR promoter, most preferably a pPcR promoter from rice.
[0434] 58. Use of a construct according to item 56 or 57 in a method for making plants having increased yield, particularly increased biomass and/or increased emergence vigour relative to control plants.
[0435] 59. Plant, plant part or plant cell transformed with a construct according to item 56 or 57.
[0436] 60. Method for the production of a transgenic plant having increased yield, particularly increased biomass and/or increased emergence vigour relative to control plants, comprising:
   [0437] (i) introducing and expressing in a plant a nucleic acid encoding a MYB7 polypeptide as defined in item 46 or 47; and
   [0438] (ii) cultivating the plant cell under conditions promoting plant growth and development.
[0439] 61. Transgenic plant having increased yield, particularly increased biomass and/or increased emergence vigour, relative to control plants, resulting from modulated expression of a nucleic acid encoding a MYB30 polypeptide as defined in item 46 or 47, or a transgenic plant cell derived from said transgenic plant.
[0440] 62. Transgenic plant according to item 55, 59 or 61, or a transgenic plant cell derived thereof, wherein said plant is a crop plant or a monocot or a cereal, such as rice, maize, wheat, barley, millet, rye, triticale, sorghum and oats.
[0441] 63. Harvestable parts of a plant according to item 62, wherein said harvestable parts are preferably vegetative biomass.
[0442] 64. Products derived from a plant according to item 62 and/or from harvestable parts of a plant according to item 63.
[0443] 65. Use of a nucleic acid encoding a MYB30 polypeptide in enhancing yield-related traits, particularly in increasing biomass and/or emergence vigour in plants, relative to control plants.
[0444] 66. A method for enhancing yield-related traits in plants relative to control plants, comprising modulating expression in a plant of a nucleic acid encoding a THOM polypeptide, wherein said THOM polypeptide comprises (i) an “N-terminal HD-ZIP” Leucine zipper domain (ii) a homeobox domain, (iii) a HALZ leucine zipper domain associated with the homeobox domain.
[0445] 67. Method according to item 66, wherein said THOM polypeptide comprises one or more of the following motifs:
   [0446] (i) Motif 12, SEQ ID NO: 124,
   [0447] (ii) Motif 13, SEQ ID NO: 125,
   [0448] (iii) Motif 14, SEQ ID NO: 126.
[0449] 68. Method according to item 66 or 67, wherein said modulated expression is effected by introducing and expressing in a plant a nucleic acid encoding a THOM polypeptide.
[0450] 69. Method according to any one of items 66 to 68, wherein said nucleic acid encoding a THOM polypeptide encodes any one of the proteins listed in Table A4 or is a portion of such a nucleic acid, or a nucleic acid capable of hybridising with such a nucleic acid.
[0451] 70. Method according to any one of items 66 to 69, wherein said nucleic acid sequence encodes an orthologue or paralogue of any of the proteins given in Table A4.
[0452] 71. Method according to any one of items 66 to 70, wherein said enhanced yield-related traits comprise increased yield, preferably increased seed yield relative to control plants.
[0453] 72. Method according to any one of items 68 to 71, wherein said nucleic acid is operably linked to a constitutive promoter, preferably to a GOS2 promoter, most preferably to a GOS2 promoter from rice.
[0454] 73. Method according to any one of items 66 to 72, wherein said nucleic acid encoding a THOM polypeptide is of plant origin, preferably from a dicotyledonous plant, further preferably from the family Solanaceae, more preferably from the genus Solanum, most preferably from Solanum lycopersicum.
[0455] 74. Plant or part thereof, including seeds, obtainable by a method according to any one of items 66 to 73, wherein said plant or part thereof comprises a recombinant nucleic acid encoding a THOM polypeptide.
[0456] 75. Construct comprising:
   [0457] (i) nucleic acid encoding a THOM polypeptide as defined in items 65 or 66;
   [0458] (ii) one or more control sequences capable of driving expression of the nucleic acid sequence of (a); and optionally
   [0459] (iii) a transcription termination sequence.
[0460] 76. Construct according to item 75, wherein one of said control sequences is a constitutive promoter, preferably a GOS2 promoter, most preferably a GOS2 promoter from rice.
[0461] 77. Use of a construct according to item 75 or 76 in a method for making plants having increased yield, particularly increased biomass and/or increased seed yield relative to control plants.
[0462] 78. Plant, plant part or plant cell transformed with a construct according to item 75 or 76.
[0463] 79. Method for the production of a transgenic plant having increased yield, particularly increased increased seed yield relative to control plants, comprising:
   [0464] (i) introducing and expressing in a plant a nucleic acid encoding a THOM polypeptide as defined in item 66 or 67; and
   [0465] (ii) cultivating the plant cell under conditions promoting plant growth and development.
[0466] 80. Transgenic plant having increased yield, particularly increased seed yield, relative to control plants, resulting from modulated expression of a nucleic acid encoding a THOM polypeptide as defined in item 66 or 67, or a transgenic plant cell derived from said transgenic plant.
[0467] 81. Transgenic plant according to item 74, 78 or 80, or a transgenic plant cell derived thereof, wherein said plant is a crop plant or a monocot or a cereal, such as rice, maize, wheat, barley, millet, rye, triticale, sorghum emmer, spelt, secale, einkorn, teff, milo and oats.
[0468] 82. Harvestable parts of a plant according to item 81, wherein said harvestable parts are preferably shoot biomass and/or seeds.
[0469] 83. Products derived from a plant according to item 81 and/or from harvestable parts of a plant according to item 82.
[0470] 84. Use of a nucleic acid encoding a THOM polypeptide in increasing yield, particularly in increasing seed yield and/or shoot biomass in plants, relative to control plants.
[0471] 85. A method for increasing yield-related traits in plants relative to control plants, comprising increasing expression in a plant of a nucleic acid sequence encoding a benzothiadiazole-induced homeodomain 2 (BIHD2) polypeptide, which BIHD2 polypeptide has in increasing order of preference at least 50%, 55%, 60%, 65%, 70%, 75%, 80%, 85%, 90%, 95%, 98%, 99% or more amino acid sequence identity to a BIHD2 polypeptide as represented by SEQ ID NO: 193, and optionally selecting for plants having increased yield-related traits.
[0472] 86. Method according to item 85, wherein said BIHD2 polypeptide comprises: (i) a homeobox domain with an InterPro accession IPRO001356; (ii) a POX domain with an InterPro accession IPRO06563; and (ii) at least one predicted coiled coil domain.
[0473] 87. Method according to item 85 or 86, wherein said BIHD2 polypeptide, is a polypeptide comprising a domain having at least 50 51%, 52%, 53%, 54%, 55%, 56%, 57%, 58%, 59%, 60%, 61%, 62%, 63%, 64%, 65%, 66%, 67%, 68%, 69%, 70%, 71%, 72%, 73%, 74%, 75%, 76%, 77%, 78%, 79%, 80%, 81%, 82%, 83%, 84%, 85%, 86%, 87%, 88%, 89%, 90%, 91%, 92%, 93%, 94%, 95%, 96%, 97%, 98%, or 99% overall sequence identity to any of the domains i) a homeobox domain with an InterPro accession IPRO001356; (ii) a POX domain with an InterPro accession IPRO06563 as present in any of the polypeptides of Table A5, preferably as present in SEQ ID NO:193.
[0474] 88. Method according to any one of items 85 to 87, wherein said BIHD2 polypeptide has in increasing order of preference at least 50%, 55%, 60%, 65%, 70%, 75%, 80%, 85%, 90%, 95%, 98%, 99% or more amino acid sequence identity to any of the polypeptide sequences given in Table A5 herein.
[0475] 89. Method according to any one of items 85 to 88, wherein said nucleic acid sequence encoding a BIHD2 polypeptide is represented by any one of the nucleic acid sequence SEQ ID NOs given in Table A5 or a portion thereof, or a sequence capable of hybridising with any one of the nucleic acid sequences SEQ ID NOs given in Table A5.
[0476] 90. Method according to any one of items 85 to 89, wherein said nucleic acid sequence encodes an orthologue or paralogue of any of the polypeptide sequence SEQ ID NOs given in Table A5.
[0477] 91. Method according to any one of items 85 to 90, wherein said increased expression is effected by any one or more of: T-DNA activation tagging, TILLING, or homologous recombination.
[0478] 92. Method according to any one of items 85 to 91, wherein said increased expression is effected by introducing and expressing in a plant a nucleic acid sequence encoding a BIHD2 polypeptide.
[0479] 93. Method according to any one of items 85 to 92, wherein said increased yield-related trait is one or more of: increased early vigour, increased total seed yield per plant, increased number of filled seeds, increased total number of seeds, or increased harvest index.
[0480] 94. Method according to any one of items 85 to 93, wherein said nucleic acid sequence is operably linked to a constitutive promoter.
[0481] 95. Method according to item 94, wherein said constitutive promoter is preferably a medium strength promoter, more preferably selected from a plant derived promoter, most preferably from rice.
[0482] 96. Method according to item 94, wherein said constitutive promoter is preferably a GOS2 promoter, more preferably a GOS2 promoter from rice, most preferably a GOS2 promoter as represented by SEQ ID NO: 248.
[0483] 97. Method according to any one of items 85 to 96, wherein said nucleic acid sequence encoding a BIHD2 polypeptide is of plant origin, preferably from a dicotyledonous plant, further preferably from a leguminous plant, more preferably from the genus medicago, most preferably from medicago truncatula.
[0484] 98. Plants, parts thereof (including seeds), or plant cells obtainable by a method according to any preceding item, wherein said plant, part or cell thereof comprises an isolated nucleic acid transgene encoding a BIHD2 polypeptide operably linked to a constitutive promoter.
[0485] 99. Construct comprising:
   [0486] (i) A nucleic acid sequence encoding a BIHD2 polypeptide as defined in any one of items 85 to 90;
   [0487] (ii) one or more control sequences capable of driving expression of the nucleic acid sequence of (a); and optionally
   [0488] (iii) a transcription termination sequence.
[0489] 100. Construct according to item 99, wherein said control sequence is constitutive promoter.
[0490] 101. Use of a construct according to items 99 or 100 in a method for making plants having increased yield-related traits relative to control plants, which increased yield-related traits are one or more of: increased early vigour, increased total seed yield per plant, increased number of filled seeds, increased total number of seeds, or increased harvest index.
[0491] 102. Plant, plant part or plant cell transformed with a construct according to item 98 or 99.
[0492] 103. Method for the production of transgenic plants having increased yield-related traits relative to control plants, comprising:
   [0493] (i) introducing and expressing in a plant, plant part, or plant cell, a nucleic acid sequence encoding a BIHD2 polypeptide as defined in any one of items 85 to 90; and
   [0494] (ii) cultivating the plant cell, plant part, or plant under conditions promoting plant growth and development.
[0495] 104. Transgenic plant having increased yield-related traits relative to control plants, resulting from increased expression of a nucleic acid sequence encoding a BIHD2 polypeptide as defined in any one of items 85 to 90, operably linked to a constitutive promoter, or a transgenic plant cell or transgenic plant part derived from said transgenic plant.
[0496] 105. Transgenic plant according to item 98, 102 or 104, wherein said plant is a crop plant or a monocot or a cereal, such as rice, maize, wheat, barley, millet, rye, triticale, sorghum and oats, or a transgenic plant cell derived from said transgenic plant.
[0497] 106. Harvestable parts comprising an isolated nucleic acid sequence encoding a BIHD2 polypeptide, of a plant according to item 105, wherein said harvestable parts are preferably seeds.
[0498] 107. Products comprising an isolated nucleic acid sequence encoding a BIHD2 polypeptide derived, from a plant according to item 105 and/or from harvestable parts of a plant according to item 106.
[0499] 108. Use of a nucleic acid sequence encoding a BIHD2 polypeptide as defined in any one of items 84 to 89 in increasing yield-related traits, comprising one or more of: increased early vigour, increased total seed yield per plant, increased number of filled seeds, increased total number of seeds, or increased harvest index.

### DESCRIPTION OF FIGURES

[0500] The present invention will now be described with reference to the following figures in which:

[0501] FIG. 1 represents the decarboxilation reaction catalyzed by ODC polypeptides.

[0502] FIG. 2 A Shows an alignment of beta/alpha barrel decarboxylases polypeptides.

[0503] FIG. 2 B Shows a phylogenetic tree of beta/alpha barrel decarboxylases polypeptides.

[0504] FIG. 3 represents the binary vector for increased expression in Oryza sativa of a ODC-encoding nucleic acids under the control of a rice GOS2 promoter (pGOS2).

[0505] FIG. 4 is a phylogenetic tree from Luo et al. (2005; Plant Biol 7: 459-468). It shows that the rice BIHD1 polypeptide clusters with the BELL 1 subfamily of homeodomain transcription factors, and not with the other subfamilies such as the Knotted1, glabra2, HD-Zip and PHD-HDrobust homeodomain polypeptides.

[0506] FIG. 5 shows the graphical output of the COILS algorithm predicting at least one coiled coil domain in the BIHD1 polypeptide as represented by SEQ ID NO: 67. The X axis represents the amino acid residue coordinates, the Y axis the probability (ranging from 0 to 1) that a coiled coil domain is present, and the three lines, the three windows (14, 21, 28) examined.

[0507] FIG. 6 shows an AlignX (from Vector NTI 10.3, Invitrogen Corporation) multiple sequence alignment of the BIHD1 polypeptides from Table A2. The PFAM homeobox domain PF00046 (intergrated into InterPro accession number IPRO001356) and the PFAM POX domain PF07526 (intergrated into InterPro accession number IPRO006563) are identified by X's below the consensus sequence. The SKY and VSLTLGL conserved motifs are also marked by X's under the consensus sequence. The three helices comprised within the homeodomain are shown by a black bold line at the top of the aligned sequences. The PYP and WF conserved amino acids, which are believed to interact directly with the DNA target sequence, are identified by their single amino acid code.

[0508] FIG. 7 shows the binary vector for increased expression in Oryza sativa of a nucleic acid sequence encoding a BIHD1 polypeptide under the control of a seed-specific promoter (pWSI18 or pRAB21) from rice.

[0509] FIG. 8 represents the domain structure, seq of SEQ ID NO: 89.

[0510] FIG. 9 represents a multiple alignment of MYB30 polypeptides.

[0511] FIG. 10 represents the binary vector for increased expression in Oryza sativa of a MYB30-encoding nucleic acid under the control of a rice protochlorophyllide reductase promoter (pPcR).

[0512] FIG. 11 represents the domain structure of SEQ ID NO: 123 with conserved motifs or domains: in bold: HD-ZIP domain, underlined: Homeobox (HOX) domain, in italics: homeobox associated leucin zipper (HALZ).

[0513] FIG. 12 represents a multiple alignment of THOM polypeptides. SEQ ID NO: 123 is represented by Le_THOM.

[0514] FIG. 13 represents the binary vector used for increased expression in Oryza sativa of a THOM-encoding nucleic acid under the control of a rice GOS2 promoter (pGOS2)

[0515] FIG. 14 shows an AlignX (from Vector NTI 10.3, Invitrogen Corporation) multiple sequence alignment of the BIHD2 polypeptides from Table A5. The PFAM homeobox domain PF00046 (intergrated into InterPro accession number IPRO001356) and the PFAM POX domain PF07526 (intergrated into InterPro accession number IPRO006563) are identified. The PYP and WF conserved amino acids, which are believed to interact directly with the DNA target sequence, are identified by their single amino acid code (underlined).

[0516] FIG. 15 shows the binary vector for increased expression in Oryza sativa of a nucleic acid sequence encoding a BIHD2 polypeptide under the control of the constitutive promoter GOS2 from rice.

### EXAMPLES

[0517] The present invention will now be described with reference to the following examples, which are by way of illustration alone. The following examples are not intended to completely define or otherwise limit the scope of the invention.

[0518] DNA manipulation: unless otherwise stated, recombinant DNA techniques are performed according to standard protocols described in (Sambrook (2001) Molecular Cloning: a laboratory manual, 3rd Edition Cold Spring Harbor Laboratory Press, CSH, New York) or in Volumes 1 and 2 of Ausubel et al. (1994), Current Protocols in Molecular Biology, Current Protocols. Standard materials and methods for plant molecular work are described in Plant Molecular Biology Labfax (1993) by R. D. D. Croy, published by BIOS Scientific Publications Ltd (UK) and Blackwell Scientific Publications (UK).

### Example 1

### Identification of sequences related to SEQ ID NO: 1, or SEQ ID NO: 2, or SEQ ID NO: 66, or SEQ ID NO: 67, or SEQ ID NO: 88, or SEQ ID NO: 89, or SEQ ID NO: 122, or SEQ ID NO: 123, or SEQ ID NO: 192, or SEQ ID NO: 193

[0519] Sequences (full length cDNA, ESTs or genomic) related to SEQ ID NO: 1, or SEQ ID NO: 2, or SEQ ID NO: 66, or SEQ ID NO: 67, or SEQ ID NO: 88, or SEQ ID NO: 89, or SEQ ID NO: 122, or SEQ ID NO: 123, or SEQ ID NO: 192, or SEQ ID NO: 193 were identified amongst those maintained in the Entrez Nucleotides database at the National Center for Biotechnology Information (NCBI) using database sequence search tools, such as the Basic Local Alignment Tool (BLAST) (Altschul et al. (1990) J. Mol. Biol. 215:403-410; and Altschul et al. (1997) Nucleic Acids Res. 25:3389-3402). The program was used to find regions of local similarity between sequences by comparing nucleic acid or polypeptide sequences to sequence databases and by calculating the statistical significance of matches. For example, the polypeptide encoded by SEQ ID NO: 1, or SEQ ID NO: 66, or SEQ ID NO: 88, or SEQ ID NO: 122, or SEQ ID NO: 192 used in the present invention was used for the TBLASTN algorithm, with default settings and the filter to ignore low complexity sequences set off. The output of the analysis was viewed by pairwise comparison, and ranked according to the probability score (E-value), where the score reflect the probability that a particular alignment occurs by chance (the lower the E-value, the more significant the hit). In addition to E-values, comparisons were also scored by percentage identity. Percentage identity refers to the number of identical nucleotides (or amino acids) between the two compared nucleic acid (or polypeptide) sequences over a particular length. In some instances, the default parameters were adjusted to modify the stringency of the search. For example the E-value were increased to show less stringent matches. This way, short nearly exact matches were identified.

[0520] Table A1 provides a list of sequences related to the ODC sequence of SEQ ID NO: 1 and/or SEQ ID NO: 2.

TABLE A1
Examples of ODC polypeptides:

| | | Nucleic | |
|---|---|---|---|
| | | acid SEQ | Protein |
| Name of sequence | Plant Source | ID NO | SEQ ID NO |
| N. tabacum | Nicotiana tabacum | 1 | 2 |
| ODC_(Nicta_ODC) | | | |
| A. anophagefferens | Aureococcus | 3 | 4 |
| 27655 | anophagefferens | | |
| A. formosa TA15389 | Aquilegia formosa | 5 | 6 |
| C. annuum AAL83709 | Capsicum annum | 7 | 8 |
| C. reinhardtii 195696 | Chlamydomonas | 9 | 10 |
| | reinhardtii | | |
| C. reinhardtii XP | Chlamydomonas | 11 | 12 |
| 001697502 | reinhardtii | | |
| D. stramonium | Datura stramonium | 13 | 14 |
| CAA61121 | | | |
| G. max | Glycine max | 15 | 16 |
| CAD91349 | | | |
| G. max | Glycine max | 17 | 18 |
| CAD91350 | | | |
| L. japonicus | Lotus japonicus | 19 | 20 |
| CAE02644 | | | |
| N. benthamiana | Nicotiana | 21 | 22 |
| BAF91874 | benthamiana | | |
| N. glutinosa | Nicotiana glutinosa | 23 | 24 |
| AAG45222 | | | |
| O. anatinus XP | Ornithorhynchus | 25 | 26 |
| 001513468 | anatinus | | |
| O. sativa | Oryza sativa | 27 | 28 |
| Os04g0136500 | | | |
| O. sativa | Oryza sativa | 29 | 30 |
| Os09g0543400 | | | |
| P. tricornutum 12642 | Phaeodactylum | 31 | 32 |
| | tricornutum | | |
| S. lycopersicum | Solanum lycopersicum | 33 | 34 |
| TA39775 | | | |
| S. pombe CAB45689 | Schizosaccharomyces | 35 | 36 |
| | pombe | | |
| S. tuberosum | Solanum tuberosum | 37 | 38 |
| TA25894 | | | |
| T. cacao ABN04356 | Theobroma cacao | 39 | 40 |
| T. maritima ODC NP | Thermotoga maritima | 41 | 42 |
| 229669 | | | |
| V. carteri 84542 | Volvox carteri | 43 | 44 |
| V. vinifera | Vitis vinifera | 45 | 46 |
| GSVIVT00016806001 | | | |
| V. vulnificus LODC | Vibrio vulnificus | 47 | 48 |
| NP 762948 | | | |
| X. laevi NP | Xenopus laevi | 49 | 50 |
| 001080167 | | | |
| Chlre_ODC | Chlamydomonas | 62 | 63 |
| | reinhardtii | | |

[0521] Table A2 provides a list of sequences related to the sequence used SEQ ID NO: 66 and/or SEQ ID NO: 67.

TABLE A2
Examples of BIHD1 polypeptide sequences, and encoding nucleic acid
sequences:

| | Source | Public database | Nucleic acid | Protein |
|---|---|---|---|---|
| Name | organism | accession number | SEQ ID NO | SEQ ID NO |
| Orysa_BIHD1 | Oryza sativa | AY524972.1 | 66 | 67 |
| Orysa_BEL1-like II | Oryza sativa | NM_001073895 | 68 | 69 |
| HD | | | | |
| Zeama_BEL1-like HD | Zea mays | AC212186.2 | 70 | 71 |
| Gymco_BIHD1 | Gymnadenia | EF051330 | 72 | 73 |
| | conopsea | | | |
| Soltu_BEL30 | Solanum | AF406703 | 74 | 75 |
| | tuberosum | | | |
| Vitvi_BEL1-like HD | Vitis vinifera | AM436871 | 76 | 77 |
| Medtr_BEL1-like HD | Medicago | AC159535 | 78 | 79 |
| | truncatula | | | |
| Arath_BHL1 | Arabidopsis | NM_001036413 | 80 | 81 |
| | thaliana | | | |
| Arath_BHL6 | Arabidopsis | NM_119627 | 82 | 83 |
| | thaliana | | | |

[0522] Table A3 provides a list of nucleic acid sequences related to SEQ ID NO: 88 and/or SEQ ID NO: 89.

TABLE A3
Examples of MYB30 nucleic acids and polypeptides:

| | | Nucleic acid | Protein |
|---|---|---|---|
| Name | Origin Species | SEQ ID NO | SEQ ID NO |
| MYB30_1 | Arabidopsis | 88 | 89 |
| | thaliana | | |
| At3g28910 | Arabidopsis | 90 | 91 |
| | thaliana | | |
| AT1G08810 | Arabidopsis | 92 | 93 |
| | thaliana | | |
| AT1G74650 | Arabidopsis | 94 | 95 |
| | thaliana | | |
| AT3G47600 | Arabidopsis | 96 | 97 |
| | thaliana | | |
| AT5G62470 | Arabidopsis | 98 | 99 |
| | thaliana | | |
| LOC_Os03g26130_11973.m07957_CDS | Oryza sativa | 100 | 101 |
| LOC_Os07g43580_11977.m08585_CDS | Oryza sativa | 102 | 103 |
| LOC_Os08g33940 | Oryza sativa | 104 | 105 |
| LOC_Os09g24800_11979.m05634_CDS | Oryza sativa | 106 | 107 |
| LOC_Os11g03440_11981.m04539_CDS | Oryza sativa | 108 | 109 |
| LOC_Os12g03150_11982.m04313_CDS | Oryza sativa | 110 | 111 |
| Poplar MYB30 | Populus | 112 | 113 |
| | trichocarpa | | |
| Zea MYB30 | Zea mays | 114 | 115 |

[0523] Table A4 provides a list of nucleic acid sequences related to SEQ ID NO: 122 and/or SEQ ID NO: 123.

TABLE A4
Examples of THOM polypeptides:

| | Nucleic acid | Protein |
|---|---|---|
| Plant Source | SEQ ID NO: | SEQ ID NO: |
| Solanum lycopersicum | 1122 | 123 |
| Populus trichocarpa | 1134 | 163 |
| Populus trichocarpa | 1135 | 164 |
| Populus trichocarpa | 1136 | 165 |
| Solanum lycopersicum | 1137 | 166 |
| Solanum lycopersicum | 1138 | 167 |
| Zea mays | 1139 | 168 |
| Populus trichocarpa | 1140 | 169 |
| Populus trichocarpa | 1141 | 170 |
| Arabidopsis thaliana | 1142 | 171 |
| Arabidopsis thaliana | 1143 | 172 |
| Arabidopsis thaliana | 1144 | 173 |
| Arabidopsis thaliana | 1145 | 174 |
| Oryza sativa | 1146 | 175 |
| Populus trichocarpa | 1147 | 176 |
| Oryza sativa | 1148 | 177 |
| Oryza sativa | 1149 | 178 |
| Oryza sativa | 1150 | 179 |
| Oryza sativa | 1151 | 180 |
| Glycine max | 1152 | 181 |
| Triticum aestivum | 1153 | 182 |
| Medicago truncatula | 1154 | 183 |
| Arabidopsis thaliana | 1155 | 184 |
| Craterostigma plantagineum | 1156 | 185 |
| Pimpinella brachycarpa | 1157 | 186 |
| Arabidopsis thaliana | 1158 | 187 |
| Silene latifolia | 1159 | 188 |
| Populus trichocarpa | 1160 | 189 |
| Picea sitchensis | 1161 | 190 |
| Glycine max | 1162 | 191 |

[0524] Table A5 provides a list of nucleic acid sequences related to the nucleic acid sequence used in the methods of the present invention.

TABLE A5
Examples of BIHD2 polypeptide sequences, and encoding nucleic acid
sequences:

| | SEQ ID NO: | SEQ ID |
|---|---|---|
| Name | Nucleic acid | NO: polypeptide |
| M. sativa_BHID2 | 192 | 193 |
| A_thaliana_AT2G27990_1_1 | 194 | 195 |
| G_gnemon_AJ318871_1 | 196 | 197 |
| O_sativa_indica_BGIOSIBCE004273_1 | 198 | 199 |
| O_sativa_indica_BGIOSIBCE012511_1 | 200 | 201 |
| O_sativa_indica_BGIOSIBCE019267_1 | 202 | 203 |
| O_sativa_LOC_Os01g62920_1_1 | 204 | 205 |
| O_sativa_LOC_Os03g47730_1_1 | 206 | 207 |
| O_sativa_LOC_Os05g38120_1_1 | 208 | 209 |
| O_sativa_Os01g0848400_1 | 210 | 211 |
| O_sativa_Os03g0680700_1 | 212 | 213 |
| O_sativa_Os05g0455200_1 | 214 | 215 |
| O_sativa_TA50671_4530_1 | 216 | 217 |
| O_sativa_TA55403_4530_1 | 218 | 219 |
| P_trichocarpa_558279_1 | 220 | 221 |
| P_trichocarpa_scaff_IX_1538_1 | 222 | 223 |
| P_trichocarpa_scaff_IX_1539_1 | 224 | 225 |
| S_bicolor_5257689_1 | 226 | 227 |
| S_bicolor_5266102_1 | 228 | 229 |
| S_bicolor_5289797_1 | 230 | 231 |
| TMxxx5170 | 232 | 233 |
| TMxxx6639 | 234 | 235 |
| V_vinifera_GSVIVT00018398001_1 | 236 | 237 |
| V_vinifera_GSVIVT00021404001_1 | 238 | 239 |
| V_vinifera_GSVIVT00024567001_1 | 240 | 241 |
| Z_mays_TA211699_4577_1 | 242 | 243 |
| Z_mays_ZM07MC19826_BFb0096N05_19776_1 | 244 | 245 |

[0525] In some instances, sequences have been tentatively assembled and publicly disclosed by research institutions, such as The Institute for Genomic Research (TIGR). The Eukaryotic Gene Orthologs (EGO) database may also be used to identify such sequences, either by keyword search or by using the BLAST algorithm with the nucleic acid or polypeptide sequence of interest. In other instances, special nucleic acid sequence databases have been created for particular organisms, such as by the Joint Genome Institute.

### Example 2

### Alignment of the Polypeptide Sequences

### 2.1. Alignment of ODC Polypeptide Sequences

[0526] Alignment of selected beta/alpha barrel decarboxylase polypeptide sequences was performed using the Clustal W algorithm of progressive alignment (Larking et al. Bioinformatics. 2007 Nov. 1; 23(21):2947-8. Thompson et al. (1997) Nucleic Acids Res 25:4876-4882; Chema et al. (2003). Nucleic Acids Res 31:3497-3500). Default values are for the gap open penalty of 10, for the gap extension penalty of 0,1 and the selected weight matrix is Blosum 62. Proteins alignment is given in FIG. 2 A.

[0527] A phylogenetic tree of ODC polypeptides (FIG. 2 B) was constructed using a neighbour-joining clustering algorithm as provided in the Clustal W programme. ODC polypeptides cluster apart of other decarboxylase such as ADC, CANSDC and DAPCD.

### 2.2 Alignment of BIHD1 Polypeptide Sequences

[0528] Multiple sequence alignment of all the BIHD1 polypeptide sequences in Table A2 was performed using the AlignX algorithm (from Vector NTI 10.3, Invitrogen Corporation). The PFAM homeobox domain PF00046 (intergrated into InterPro accession number IPRO001356) and the PFAM POX domain PF07526 (intergrated into InterPro accession number IPRO006563) are identified by X's below the consensus sequence. The SKY and VSLTLGL conserved motifs are also marked by X's under the consensus sequence. The three helices comprised within the homeodomain are shown by a black bold line at the top of the aligned sequences. The PYP and WF conserved amino acids, which are believed to interact directly with the DNA target sequence, are identified by their single amino acid code.

### 2.3: Alignment of MYB30 Polypeptide Sequences

[0529] Alignment of MYB30 polypeptide sequences was performed using the AlignX programme from the Vector NTI (Invitrogen) which is based on the popular Clustal W algorithm of progressive alignment (Thompson et al. (1997) Nucleic Acids Res 25:4876-4882; Chema et al. (2003). Nucleic Acids Res 31:3497-3500). Default values are as follows: the gap open penalty is 10, the gap extension penalty is 0,1 and the weight matrix is Blosum 62 (if polypeptides are aligned). Minor manual editing may be done to further optimise the alignment. Sequence conservation among MYB30 polypeptides is essentially in the SANT or in the MYB_DNA-binding domain of the polypeptides, rather than in the region outside of the domain. The MYB30 polypeptides of Table A3 are aligned in FIG. 9.

[0530] Examples of phylogenetic trees of MYB30 polypeptides are given in FIG. 2 of Stracke et al. 2001 (Arabidopsis thaliana MYB proteins) and in FIG. 8 and supplementary data of Jiang et al. 2004 (Arabidopsis thaliana and Oryza sativa MYB proteins).

### 2.4. Alignment of THOM Polypeptide Sequences

[0531] Alignment of polypeptide sequences was performed using the ClustalW 2.0 algorithm of progressive alignment (Thompson et al. (1997) Nucleic Acids Res 25:4876-4882; Chema et al. (2003). Nucleic Acids Res 31:3497-3500) with standard setting (slow alignment, similarity matrix: Gonnet, gap opening penalty 10, gap extension penalty: 0.2). Minor manual editing was done to further optimise the alignment. Sequence conservation among THOM polypeptides is essentially in the Homeobox domain and the associated HALZ Leucine Zipper domain in the C-terminal part of the polypeptides. The N-terminal HD-ZIP domain is less conserved. The THOM polypeptides are aligned in FIG. 12.

### 2.5. Alignment of BIHD2 Polypeptide Sequences

[0532] Multiple sequence alignment of all the BIHD2 polypeptide sequences in Table A5 was performed using the AlignX algorithm (from Vector NTI 10.3, Invitrogen Corporation). The PFAM homeobox domain PF00046 (intergrated into InterPro accession number IPRO001356) and the PFAM POX domain PF07526 (intergrated into InterPro accession number IPRO006563) are identified below the consensus sequence. GPFTGY box, the SNWFINARV box, the RGLP box, and the HFLHPYP conserved boxes or also called motifs are identifiable on the consensus sequence by their single amino acid code. The PYP and WF conserved amino acids, which are believed to interact directly with the DNA target sequence are underlined.

### Example 3

### Calculation of Global Percentage Identity

[0533] Global percentages of similarity and identity between full length polypeptide sequences useful in performing the methods of the invention were determined using one of the methods available in the art, the MatGAT (Matrix Global Alignment Tool) software (BMC Bioinformatics. 2003 4:29. MatGAT: an application that generates similarity/identity matrices using protein or DNA sequences. Campanella J J, Bitincka L, Smalley J; software hosted by Ledion Bitincka). MatGAT software generates similarity/identity matrices for DNA or protein sequences without needing pre-alignment of the data. The program performs a series of pair-wise alignments using the Myers and Miller global alignment algorithm (with a gap opening penalty of 12, and a gap extension penalty of 2), calculates similarity and identity using for example Blosum 62 (for polypeptides), and then places the results in a distance matrix. Sequence similarity is shown in the bottom half of the dividing line and sequence identity is shown in the top half of the diagonal dividing line.

[0534] Parameters used in the comparison were:
[0535] Scoring matrix: Blosum62
[0536] First Gap: 12
[0537] Extending gap: 2

[0538] Results of the software analysis are shown in Table B1-B4 for the global similarity and identity over the full length of the polypeptide sequences. Percentage identity is given above the diagonal in bold and percentage similarity is given below the diagonal (normal face).

### 3.1. Ornithine Decarboxylase (ODC) Sequences

[0539] The percentage identity between the ODC polypeptide sequences of Table B1 useful in performing the methods of the invention can be as low as 39% amino acid identity compared to SEQ ID NO: 2.

TABLE B1
MatGAT results for global similarity and identity over the full length of the polypeptide sequences.
The SEQ ID NO: of the sequences of the proteins used in the comparison is given in Table A1.

| PRT nr | name | 1 | 2 | 3 | 4 | 5 | 6 | 7 | 8 | 9 | 10 | 11 | 12 | 13 | 14 |
|---|---|---|---|---|---|---|---|---|---|---|---|---|---|---|---|
| 1 | C. reinhardtii XP_001697502 | | 41 | 39 | 39 | 39 | 39 | 39 | 39 | 38 | 40 | 38 | 43 | 42 | 34 |
| 2 | S. pombe CAB45689 | 41 | | 40 | 40 | 40 | 40 | 39 | 39 | 39 | 38 | 37 | 41 | 41 | 35 |
| 3 | A. formosa TA15389 | 39 | 40 | | 64 | 65 | 64 | 66 | 65 | 65 | 61 | 56 | 56 | 56 | 53 |
| 4 | S. lycopersicum TA39775 | 39 | 40 | 64 | | 97 | 92 | 91 | 90 | 90 | 58 | 56 | 54 | 53 | 49 |
| 5 | S. tuberosum TA25894 | 39 | 40 | 65 | 97 | | 92 | 91 | 90 | 90 | 59 | 56 | 54 | 53 | 49 |
| 6 | C. annuum AAL83709 | 39 | 40 | 64 | 92 | 92 | | 89 | 88 | 88 | 59 | 56 | 54 | 53 | 48 |
| 7 | N. tabacum ODC | 39 | 39 | 66 | 91 | 91 | 89 | | 99 | 98 | 59 | 57 | 56 | 54 | 50 |
| 8 | N. benthamiana BAF91874 | 39 | 39 | 65 | 90 | 90 | 88 | 99 | | 97 | 59 | 58 | 56 | 54 | 50 |
| 9 | N. glutinosa AAG45222 | 38 | 39 | 65 | 90 | 90 | 88 | 98 | 97 | | 57 | 57 | 55 | 53 | 49 |
| 10 | G. max CAD91350 | 40 | 38 | 61 | 58 | 59 | 59 | 59 | 59 | 57 | | 71 | 55 | 57 | 50 |
| 11 | L. japonicus CAE02644 | 38 | 37 | 56 | 56 | 56 | 56 | 57 | 58 | 57 | 71 | | 53 | 52 | 48 |
| 12 | O. sativa Os09g0543400 | 43 | 41 | 56 | 54 | 54 | 54 | 56 | 56 | 55 | 55 | 53 | | 82 | 52 |
| 13 | O. sativa Os04g0136500 | 42 | 41 | 56 | 53 | 53 | 53 | 54 | 54 | 53 | 57 | 52 | 82 | | 51 |
| 14 | V. vinifera GSVIVT 00016806001 | 34 | 35 | 53 | 49 | 49 | 48 | 50 | 50 | 49 | 50 | 48 | 52 | 51 | |

### 3.2. BIHD1 Sequences

[0540] The percentage identity between a BIHD1 full length polypeptide sequence as represented by SEQ ID NO: 67 and other BIHD1 polypeptide sequences compiled in Table A2, is of 35% or more.

TABLE B2
MatGAT results for global similarity and identity over the
full length of the polypeptide sequences of Table A2.

| | 1 | 2 | 3 | 4 | 5 | 6 | 7 | 8 | 9 |
|---|---|---|---|---|---|---|---|---|---|
| 1. Orysa_BIHD1 | | 78 | 76 | 46 | 42 | 46 | 37 | 35 | 40 |
| 2. Zeama_BEL\like | 87 | | 74 | 44 | 42 | 43 | 36 | 34 | 38 |
| 3. Orysa_BEL1 II | 86 | 84 | | 47 | 42 | 45 | 36 | 36 | 40 |
| 4. Gymco_BIHD1 | 64 | 62 | 64 | | 44 | 47 | 39 | 32 | 41 |
| 5. Soltu_BEL30 | 59 | 58 | 60 | 60 | | 58 | 39 | 34 | 40 |
| 6. Vitvi_BEL1 HD | 62 | 59 | 62 | 60 | 71 | | 42 | 36 | 42 |
| 7. Medtr_BEL1 HD | 56 | 53 | 55 | 59 | 56 | 57 | | 32 | 38 |
| 8. Arath_BHL1 | 52 | 52 | 52 | 49 | 49 | 53 | 49 | | 34 |
| 9. Arath_BHL6 | 52 | 52 | 54 | 54 | 52 | 53 | 52 | 46 | |

### 3.3. MYB30 Sequences

[0541] The percentage identity between the MYB30 polypeptide sequences useful in performing the methods of the invention can be as low as 37.8% amino acid identity compared to SEQ ID NO: 89 (4. MYB30_{—}1).

TABLE B3
MatGAT results for global similarity and identity over the
full length of the polypeptide sequences.

| Polypeptide Name | 1 | 2 | 3 | 4 | 5 |
|---|---|---|---|---|---|
| 1. Poplar\MYB30\ | | 39.4 | 50.5 | 55.7 | 56.0 |
| 2. LOC_Os08g33940 | 51.8 | | 53.7 | 37.8 | 38.1 |
| 3. Zea\MYB30\ | 66.8 | 58.9 | | 49.0 | 49.3 |
| 4. MYB30_1 | 73.7 | 51.6 | 66.9 | | 99.7 |
| 5. At3g28910 | 73.7 | 51.6 | 66.9 | 100.0 | |

### 3.4. THOM Sequences

[0542] The percentage identity between the THOM polypeptide sequences useful in performing the methods of the invention can be as low as 39% amino acid identity compared to SEQ ID NO: 123 (Le_THOM).

TABLE B4
MatGAT results for global similarity and identity over the full length of the
polypeptide sequences.

| | 1 | 2 | 3 | 4 | 5 | 6 | 7 | 8 | 9 | 10 | 11 |
|---|---|---|---|---|---|---|---|---|---|---|---|
| 1. Pt_40.143 | | 85.3 | 61.5 | 59.9 | 61.0 | 48.1 | 46.0 | 44.4 | 58.9 | 56.4 | 53.8 |
| 2. Pt_II.1260 | 88.3 | | 57.6 | 56.5 | 56.5 | 44.0 | 43.2 | 42.1 | 55.3 | 52.7 | 51.4 |
| 3. Pt_29.72 | 73.2 | 70.6 | | 52.4 | 68.7 | 46.3 | 47.3 | 44.7 | 56.1 | 64.2 | 62.3 |
| 4. SI_TA56840 | 71.1 | 68.6 | 65.2 | | 52.2 | 46.1 | 41.7 | 41.7 | 51.7 | 50.7 | 49.5 |
| 5. SI_TA49906 | 71.8 | 68.0 | 77.2 | 62.9 | | 46.9 | 45.1 | 47.6 | 52.6 | 62.7 | 58.4 |
| 6. Zm_07MC27159 | 55.4 | 53.1 | 54.3 | 56.6 | 57.9 | | 38.4 | 39.1 | 45.5 | 44.8 | 46.8 |
| 7. Pt_XVI.516 | 57.6 | 58.1 | 54.9 | 52.0 | 54.9 | 45.3 | | 86.6 | 39.8 | 43.2 | 41.5 |
| 8. Pt_VI.1202 | 57.7 | 58.6 | 55.5 | 54.3 | 58.6 | 46.0 | 90.4 | | 42.0 | 43.6 | 42.2 |
| 9. At3g60390 | 74.4 | 71.8 | 69.6 | 62.5 | 64.4 | 54.2 | 53.8 | 54.3 | | 50.9 | 48.7 |
| 10. At4g16780 | 67.1 | 65.4 | 75.8 | 61.5 | 77.6 | 54.8 | 50.6 | 53.1 | 63.1 | | 57.7 |
| 11. At5g47370 | 64.8 | 63.4 | 72.5 | 64.3 | 69.6 | 56.8 | 50.6 | 53.1 | 59.9 | 72.2 | |
| 12. At2g44910 | 71.4 | 70.4 | 67.0 | 63.5 | 61.9 | 49.7 | 53.5 | 60.1 | 78.6 | 61.3 | 57.9 |
| 13. Os10g41230 | 62.7 | 61.8 | 59.7 | 56.8 | 58.8 | 58.1 | 52.6 | 56.4 | 56.4 | 56.8 | 55.2 |
| 14. Pt_286586 | 63.4 | 58.6 | 54.3 | 54.9 | 56.8 | 68.0 | 43.3 | 43.9 | 54.2 | 55.9 | 54.3 |
| 15. Os_CAA65456 | 62.4 | 61.7 | 59.8 | 56.3 | 59.2 | 58.2 | 53.8 | 57.7 | 59.9 | 55.9 | 54.7 |
| 16. Os_Q84U86 | 55.2 | 54.4 | 56.2 | 54.9 | 51.3 | 49.0 | 50.0 | 50.3 | 52.9 | 54.2 | 48.1 |
| 17. Os06g04850 | 49.0 | 49.2 | 54.6 | 55.2 | 55.0 | 57.0 | 43.6 | 45.7 | 48.7 | 53.4 | 53.6 |
| 18. Os04g4635012004 | 56.4 | 54.0 | 56.0 | 57.7 | 59.3 | 62.8 | 45.6 | 49.1 | 55.4 | 57.3 | 57.1 |
| 19. Gm_06MC31751 | 57.6 | 58.8 | 57.2 | 55.0 | 58.8 | 49.8 | 55.2 | 57.1 | 57.4 | 50.5 | 52.7 |
| 20. Ta_ABC86568 | 55.0 | 53.1 | 53.3 | 55.9 | 55.4 | 54.1 | 46.8 | 46.6 | 54.2 | 55.5 | 56.4 |
| 21. Mt_DW016069_ps | 48.0 | 46.9 | 51.7 | 51.0 | 53.9 | 62.2 | 48.3 | 53.1 | 46.2 | 52.3 | 52.9 |
| 22. At5g06710 | 55.7 | 53.0 | 54.5 | 53.0 | 52.7 | 45.5 | 64.2 | 64.9 | 56.3 | 54.5 | 50.9 |
| 23. Le_THOM | 71.1 | 68.6 | 65.2 | 100.0 | 62.9 | 56.3 | 51.7 | 54.3 | 63.1 | 61.5 | 64.3 |

| | 12 | 13 | 14 | 15 | 16 | 17 | 18 | 19 | 20 | 21 | 22 | 23 |
|---|---|---|---|---|---|---|---|---|---|---|---|---|
| 1. Pt_40.143 | 57.8 | 47.9 | 63.4 | 48.2 | 42.4 | 40.6 | 46.2 | 41.6 | 39.9 | 40.6 | 41.1 | 59. [symbol] |
| 2. Pt_II.1260 | 54.5 | 45.3 | 57.9 | 45.4 | 39.0 | 38.8 | 44.1 | 39.8 | 39.0 | 38.3 | 36.6 | 56. [symbol] |
| 3. Pt_29.72 | 55.0 | 45.4 | 47.7 | 45.9 | 41.2 | 43.3 | 47.1 | 40.7 | 41.9 | 44.7 | 41.2 | 52. [symbol] |
| 4. SI_TA56840 | 49.9 | 45.4 | 49.1 | 45.8 | 41.6 | 43.2 | 44.6 | 40.9 | 41.6 | 41.3 | 39.9 | 99. [symbol] |
| 5. SI_TA49906 | 52.3 | 45.6 | 50.3 | 46.4 | 39.1 | 41.3 | 46.8 | 43.8 | 42.4 | 46.3 | 39.8 | 51. [symbol] |
| 6. Zm_07MC27159 | 43.2 | 50.8 | 60.8 | 51.2 | 39.5 | 46.1 | 52.4 | 39.2 | 44.5 | 51.1 | 36.7 | 45. [symbol] |
| 7. Pt_XVI.516 | 43.3 | 39.4 | 36.6 | 40.5 | 36.1 | 36.0 | 36.0 | 39.0 | 36.8 | 42.9 | 51.4 | 41. [symbol] |
| 8. Pt_VI.1202 | 45.4 | 40.6 | 36.9 | 41.5 | 36.1 | 38.5 | 35.8 | 40.2 | 34.8 | 46.7 | 53.3 | 41. [symbol] |
| 9. At3g60390 | 64.8 | 44.5 | 48.7 | 46.0 | 37.9 | 38.2 | 43.7 | 41.1 | 39.6 | 38.3 | 39.1 | 51. [symbol] |
| 10. At4g16780 | 49.8 | 44.0 | 47.4 | 44.1 | 41.7 | 44.1 | 45.1 | 38.7 | 40.7 | 42.6 | 41.5 | 50. [symbol] |
| 11. At5g47370 | 47.0 | 41.5 | 47.3 | 42.2 | 37.9 | 41.2 | 43.5 | 40.9 | 39.9 | 42.7 | 36.5 | 49. [symbol] |
| 12. At2g44910 | | 43.6 | 45.9 | 45.1 | 39.6 | 38.8 | 44.8 | 41.9 | 40.9 | 38.7 | 40.2 | 49. [symbol] |
| 13. Os10g41230 | 58.2 | | 41.2 | 98.7 | 38.2 | 41.8 | 41.0 | 37.9 | 37.9 | 37.2 | 37.0 | 45. [symbol] |
| 14. Pt_286586 | 51.6 | 48.4 | | 42.2 | 36.9 | 41.7 | 46.4 | 38.3 | 39.1 | 54.1 | 36.8 | 48. [symbol] |
| 15. Os_CAA65456 | 59.7 | 98.7 | 49.2 | | 38.5 | 43.4 | 41.2 | 37.9 | 38.5 | 38.3 | 38.0 | 45. [symbol] |
| 16. Os_Q84U86 | 56.3 | 53.2 | 44.8 | 53.1 | | 48.3 | 39.4 | 35.0 | 51.2 | 39.3 | 35.2 | 41. [symbol] |
| 17. Os06g04850 | 48.7 | 51.6 | 51.2 | 53.1 | 56.2 | | 43.6 | 34.7 | 53.7 | 41.8 | 35.9 | 42. [symbol] |
| 18. Os04g4635012004 | 56.0 | 52.6 | 54.3 | 52.4 | 48.7 | 54.7 | | 37.4 | 45.3 | 47.4 | 36.1 | 44. [symbol] |
| 19. Gm_06MC31751 | 56.3 | 53.1 | 48.2 | 53.7 | 53.1 | 44.7 | 49.5 | | 35.4 | 39.2 | 38.2 | 39. [symbol] |
| 20. Ta_ABC86568 | 54.4 | 51.0 | 46.6 | 52.1 | 66.6 | 62.7 | 54.8 | 51.8 | | 39.4 | 34.8 | 42. [symbol] |
| 21. Mt_DW016069_ps | 48.1 | 44.8 | 63.9 | 45.7 | 46.8 | 52.7 | 56.7 | 49.2 | 49.8 | | 42.3 | 40. [symbol] |
| 22. At5g06710 | 57.1 | 51.2 | 42.6 | 52.4 | 50.6 | 46.4 | 47.6 | 53.3 | 49.1 | 48.5 | | 39. [symbol] |
| 23. Le_THOM | 62.6 | 56.8 | 54.9 | 56.3 | 54.9 | 55.2 | 57.7 | 53.4 | 57.0 | 51.0 | 53.0 | |

[symbol]

indicates data missing or illegible when filed

### Example 4

### Identification of Domains

[0543] The Integrated Resource of Protein Families, Domains and Sites (InterPro) database is an integrated interface for the commonly used signature databases for text- and sequence-based searches. The InterPro database combines these databases, which use different methodologies and varying degrees of biological information about well-characterized proteins to derive protein signatures. Collaborating databases include SWISS-PROT, PROSITE, TrEMBL, PRINTS, Propom and Pfam, Smart and TIGRFAMs. The Pfam database is a large collection of protein families, each represented by multiple sequence alignments and hidden Markov models (HMMs). Proteins are generally composed of one or more functional regions, commonly termed domains. Different combinations of domains give rise to the diverse range of proteins found in nature. The identification of domains that occur within proteins can therefore provide insights into their function. Pfam is hosted at the Sanger Institute server in the United Kingdom. Interpro is hosted at the European Bioinformatics Institute in the United Kingdom.

### 4.1. ODC Sequences

[0544] The results of the InterPro scan of the polypeptide sequence as represented by SEQ ID NO: 2 are presented in Table C1.

[0545] The following Interpro domains were found in SEQ ID NO: 2: IPRO00183 (Orn/DAP/Arg decarboxylase), IPRO09006 (Alanine/racemase/group/IV/decarboxylase:C-terminal), IPR 002433 (Ornithine decarboxylase).

TABLE C1
InterPro scan results (major accession numbers) of the polypeptide sequence
as represented by SEQ ID NO: 2.

| | | | | Amino acid | |
|---|---|---|---|---|---|
| | | Domain | Domain | coordinates | |
| method | Database | AccNumber | shortName | in SEQ ID NO 2 | e-value |
| FPrintScan | PRINTS* | PR01179 | ODADCRBXLASE | T[93-111] | 4.2E−33 |
| | | | | T[113-125] | 4.2E−33 |
| | | | | T[216-229] | 4.2E−33 |
| | | | | T[296-315] | 4.2E−33 |
| | | | | T[405-418] | 4.2E−33 |
| HMMPfam | Pfam | PF00278 | Orn_DAP_Arg_deC | T[310-427] | 5.3E−48 |
| HMMPfam | Pfam | PF02784 | Orn_Arg_deC_N | T[71-307] | 3.2E−80 |
| ProfileScan | PROSITE | PS00878 | ODR_DC_2_1 | T[93-111] | 0.0 |
| ProfileScan | PROSITE | PS00879 | ODR_DC_2_2 | T[251-268] | 0.0 |
| FPrintScan | PRINTS* | PR01182 | ORNDCRBXLASE | T[65-89] | 2.6E−66 |
| | | | | T[91-118] | 2.6E−66 |
| | | | | T[135-159] | 2.6E−66 |
| | | | | T[165-187] | 2.6E−66 |
| | | | | T[331-344] | 2.6E−66 |
| | | | | T[372-382] | 2.6E−66 |
| | | | | T[392-405] | 2.6E−66 |
| superfamily | Superfamily** | SSF50621 | Racem_decarbox_C | T[301-419] | 7.93E−16 |

*PRINTS. Attwood et al. (2003) Nucleic Acids Research, 31(1), 400-402.
**Superfamily Gough et al. (2001) J Mol Biol. Nov 2; 313(4): 903-19.

4.2. BIHD1 sequences The results of the InterPro scan of the polypeptide sequence as represented by SEQ ID NO: 67 are presented in Table C2.

TABLE C2
InterPro scan results of the polypeptide sequence as represented
by SEQ ID NO: 67

| InterPro accession | Integrated | Integrated | Integrated |
|---|---|---|---|
| number | database | database | database |
| and name | name | accession number | accession name |
| IPR0001356 | Pfam | PF00046 | Homeobox |
| Homeobox | | | |
| | SMART | SM00389 | HOX |
| | ProSite | PS50071 | Homeobox_2 |
| | ProSite | PS00027 | Homeobox_1 |
| IPR0006563 POX | Pfam | PF07526 | POX |
| | SMART | SM00574 | POX |
| No IPR integrated | PANTHER | PTHR11850 | Homeobox |
| | | | protein |
| | | | transcription |
| | | | factors |
| | PANTHER | PTHR11850:SF14 | BEL1 homeotic |
| | | | protein |

[0546] 4.3. MYB30 Sequences

[0547] The results of the InterPro scan of the polypeptide sequence as represented by SEQ ID NO: 89 are presented in Table C3.

TABLE C3
InterPro scan results (major accession numbers) of the polypeptide sequence
as represented by SEQ ID NO: 89.

| | | | | Amino acid |
|---|---|---|---|---|
| | Accession | | | coordinates |
| Database | number | Accession name | e-value | on SEQ ID NO 89 |
| HMMPfam | PF00249 | Myb_DNA-binding | 7.6e−11/1.3e−10 | [14-61]T/[67-112]T |
| HMMSmart | SM00717 | SANT | 1.6e−14/2.5e−15 | [13-63]T/[66-114]T |
| ProfileScan | PS00334 | MYB_2 | 8e−5 | [89-112]T |
| ProfileScan | PS50090 | MYB_3 | 17.058/15.179 | [9-61]T/[62-112]T |
| PANTHER | PTHR10641 | MYB-RELATED | 5e−92 | [3-159]T |

### 4.4. THOM Sequences

[0548] The results of the InterPro scan of the polypeptide sequence as represented by SEQ ID NO: 123 are presented in Table C4.

TABLE C4
InterPro scan results (major accession numbers) of the polypeptide sequence
as represented by SEQ ID NO: 123.

| | | | Amino acid |
|---|---|---|---|
| | | | coordinates |
| Database | Accession number | Accession name | on SEQ ID NO 123 |
| InterPro | IPR000047 | Helix-turn-helix motif, lambda-like | |
| | | repressor | |
| PRINTS | PR00031 | HTHREPRESSR | 157-182 |
| InterPro | IPR001356 | Homeobox | |
| PRODOM | PD000010 | Q7XC54_EEEEE_Q7XC54 | 130-187 |
| PRINTS | PR00024 | HOMEOBOX | 165-184 |
| PFAM | PF00046 | Homeobox | 131-185 |
| SMART | SM00389 | HOX | 128-190 |
| PROSITE | PS00027 | HOMEOBOX_1 | 161-184 |
| InterPro | IPR003106 | Leucine zipper, homeobox- | |
| | | associated | |
| PFAM | PF02183 | HALZ | 186-230 |
| SMART | SM00340 | HALZ | 186-229 |
| InterPro | IPR006712 | HD-ZIP protein, N-terminal | |
| PFAM | PF04618 | HD-ZIP_N | 1-107 |
| InterPro | IPR012287 | Homeodomain-related | |
| GENE3D | G3DSA:1.10.10.60 | no description | 132-184 |
| PANTHER | PTHR19418 | HOMEOBOX PROTEIN | 103-191 |

[0549] The presence of conserved domains in SEQ ID NO: 123 was determined by searching in the Pfam database (Release 1.7) Finn et al. Nucleic Acids Research (2008) Database Issue 36:D281-D288

[0550] The results of the Pfam search of the polypeptide sequence as represented by SEQ ID NO: 193 are detailed in Table C5.

TABLE C5

| | | Amino acid | Amino acid |
|---|---|---|---|
| Database | Name | coordinate start | coordinate end |
| PF07526 | POX | 136 | 261 |
| PF00046 | Homeobox | 307 | 365 |

### Example 5

### Subcellular Localisation Prediction of the BIHD1 Polypeptide Sequences and BIHD2 Polypeptide Sequences

[0551] Experimental methods for protein localization range from immunolocalization to tagging of proteins using green fluorescent protein (GFP) or beta-glucuronidase (GUS). For example, the Oryza sativa BIHD1 polypeptide has been found to mainly localized in the nucleus of plant cells, using a GFP-based approach and tranbsient expression in onion cells (Luo et al. (2005) supra).

[0552] Computational prediction of protein localisation from sequence data was also performed. Among algorithms well known to a person skilled in the art are available at the ExPASy Proteomics tools hosted by the Swiss Institute for Bioinformatics, for example, PSort, TargetP, ChloroP, LocTree, Predotar, LipoP, MITOPROT, PATS, PTS1, SignalP, TMHMM and others.

[0553] LOCtree is an algorithm that can predict the subcellular localization and DNA-binding propensity of non-membrane proteins in non-plant and plant eukaryotes as well as prokaryotes. LOCtree classifies eukaryotic animal proteins into one of five subcellular classes, while plant proteins are classified into one of six classes and prokaryotic proteins are classified into one of three classes.

[0554] Whenever available, LOCtree also reports predictions based on the following: 1) Nuclear localization signals found by the PredictNLS algorithm, 2) Localization inferred using Prosite motifs and Pfam domains found in the protein, and 3) SWISS-PROT keywords associated with a protein. Localization is inferred in the last two cases using the entropy-based LOCkey algorithm. The software is hosted at the University of Columbia, USA.

[0555] Motif and keyword based prediction of subcellular localization of a BIHD1 polypeptide as represented by SEQ ID NO: 67, using LOCkey:

| Predicted | | Alternative | SWISS-PROT keywords used |
|---|---|---|---|
| Localization | Confidence | prediction | to assign localization |
| Nuclear | 100 | — | Homeobox, DNA-binding, |
| | | | Transcription regulation, |
| | | | Nuclear protein, |
| | | | Transcription, Repressor |

### Example 6

### Prediction of Secondary Structure Features of the BIHD1 Polypeptide Sequences and BIHD2 Polypeptide Sequences

[0556] Coiled coils usually contain a repeated seven amino acid residue pattern called heptad repeats. Coiled coils are important to identify for protein-protein interactions, such as oligomerization, either of identical proteins, of proteins of the same family, or of unrelated proteins. Recently much progress has been made in computational prediction of coiled coils from sequence data. Many algorithms well known to a person skilled in the art are available at the ExPASy Proteomics tools. One of them, COILS, is a program that compares a sequence to a database of known parallel two-stranded coiled-coils and derives a similarity score. By comparing this score to the distribution of scores in globular and coiled-coil proteins, the program then calculates the probability that the sequence will adopt a coiled-coil conformation.

### 6.1. BIHD1 Sequences

[0557] The BIHD1 polypeptide as represented by SEQ ID NO: 67, has at least one predicted coiled coil domain, with a high probability, in all three windows (14, 21 and 28) examined. In Table D, the residue coordinates, residues, the three windows and corresponding probability values are shown. In FIG. 5, is the graphical output of the COILS algorithm on the polypeptide as represented by SEQ ID NO: 67, where the predicted coiled coil is clearly visible in all three windows (as represented by the three lines).

TABLE D
Numerical output of the COILS algorithm on the polypeptide as represented by
SEQ ID NO: 67. The residue coordinates (#), residues, the three windows and
corresponding probability values are shown.

| # | Residue | Window = 14 | Prob | Window = 21 | Prob | Window = 28 | Prob |
|---|---|---|---|---|---|---|---|
| 259 | E | b | 0.570 | b | 0.895 | b | 0.995 |
| 260 | I | c | 0.570 | c | 0.895 | c | 0.995 |
| 261 | S | d | 0.808 | d | 0.991 | d | 0.996 |
| 262 | A | e | 0.995 | e | 0.997 | e | 0.999 |
| 263 | A | f | 0.997 | f | 0.998 | f | 0.999 |
| 264 | E | g | 0.997 | g | 0.999 | g | 0.999 |
| 265 | K | a | 0.997 | a | 0.999 | a | 0.999 |
| 266 | Q | b | 0.997 | b | 0.999 | b | 0.999 |
| 267 | E | c | 0.997 | c | 0.999 | c | 0.999 |
| 268 | L | d | 0.997 | d | 0.999 | d | 0.999 |
| 269 | Q | e | 0.997 | e | 0.999 | e | 0.999 |
| 270 | N | f | 0.997 | f | 0.999 | f | 0.999 |
| 271 | K | g | 0.997 | g | 0.999 | g | 0.999 |
| 272 | M | a | 0.997 | a | 0.999 | a | 0.999 |
| 273 | A | b | 0.997 | b | 0.999 | b | 0.999 |
| 274 | K | c | 0.997 | c | 0.999 | c | 0.999 |
| 275 | L | d | 0.997 | d | 0.999 | d | 0.999 |
| 276 | M | e | 0.997 | e | 0.999 | e | 0.999 |
| 277 | A | f | 0.997 | f | 0.999 | f | 0.999 |
| 278 | M | g | 0.978 | g | 0.999 | g | 0.999 |
| 279 | L | a | 0.978 | a | 0.999 | a | 0.999 |
| 280 | D | b | 0.975 | b | 0.999 | b | 0.999 |
| 281 | E | c | 0.975 | c | 0.999 | c | 0.999 |
| 282 | V | d | 0.771 | d | 0.999 | d | 0.999 |
| 283 | D | e | 0.315 | e | 0.999 | e | 0.999 |
| 284 | R | f | 0.261 | f | 0.999 | f | 0.999 |
| 285 | K | g | 0.261 | g | 0.998 | g | 0.999 |
| 286 | Y | a | 0.257 | a | 0.998 | a | 0.999 |
| 287 | K | b | 0.257 | b | 0.998 | b | 0.999 |
| 288 | H | c | 0.075 | c | 0.972 | c | 0.999 |
| 289 | Y | d | 0.027 | d | 0.899 | d | 0.999 |
| 290 | Y | e | 0.019 | e | 0.228 | e | 0.998 |
| 291 | H | f | 0.019 | f | 0.122 | f | 0.995 |
| 292 | Q | g | 0.019 | g | 0.122 | g | 0.995 |
| 293 | M | a | 0.015 | a | 0.122 | a | 0.995 |
| 294 | Q | b | 0.015 | b | 0.122 | b | 0.995 |
| 295 | I | c | 0.002 | c | 0.021 | c | 0.883 |
| 296 | V | d | 0.002 | d | 0.005 | d | 0.500 |
| 297 | V | e | 0.001 | e | 0.002 | e | 0.055 |

### 6.2. BIHD2 Sequences

[0558] The presence of Coiled coil domains in a BIHD2 polypeptide may be determine by any one of the techniques and methods above-mentioned.

### Example 7

### Topology Prediction of the THOM Polypeptide Sequences

[0559] TargetP 1.1 predicts the subcellular location of eukaryotic proteins (Emanuelsson et al., Nature Protocols 2, 953-971, (2007)). The location assignment is based on the predicted presence of any of the N-terminal pre-sequences: chloroplast transit peptide (cTP), mitochondrial targeting peptide (mTP) or secretory pathway signal peptide (SP). Scores on which the final prediction is based are not really probabilities, and they do not necessarily add to one. However, the location with the highest score is the most likely according to TargetP, and the relationship between the scores (the reliability class) may be an indication of how certain the prediction is. The reliability class (RC) ranges from 1 to 5, where 1 indicates the strongest prediction. TargetP is maintained at the server of the Technical University of Denmark.

[0560] For the sequences predicted to contain an N-terminal presequence a potential cleavage site can also be predicted.

[0561] A number of parameters were selected, such as organism group (non-plant or plant), cutoff sets (none, predefined set of cutoffs, or user-specified set of cutoffs), and the calculation of prediction of cleavage sites (yes or no).

[0562] The results of TargetP 1.1 analysis of the polypeptide sequence as represented by SEQ ID NO: 123 are presented Table E. The “plant” organism group has been selected, no cutoffs defined, and the predicted length of the transit peptide requested. The subcellular localization of the polypeptide sequence as represented by SEQ ID NO: 123 may be the cytoplasm or nucleus, no transit peptide is predicted.

TABLE E
TargetP 1.1 analysis of the polypeptide sequence as represented by
SEQ ID NO: 123;

| Name | Length | cTP | mTP | SP | other | Loc | RC |
|---|---|---|---|---|---|---|---|
| Sequence | 286 | 0.414 | 0.125 | 0.051 | 0.538 | — | 5 |
| Cutoff | | 0.000 | 0.000 | 0.000 | 0.000 | | |

cTP, probability of chloroplastic location;
mTP, probability of mitochondrial location;
SP, probability of secretory pathway signal peptide;
other, probability of other location (cytoplasm, nucleus);
Loc, predicted location;
RC, Reliability class

[0563] When using the PLOC algorithm (Park and Kanehisa, Bioinformatics, 19, 1656-1663, 2003), the THOM polypeptide is predicted to have a nuclear localisation.

[0564] Many other algorithms can be used to perform such analyses, including:
[0565] ChloroP 1.1 hosted on the server of the Technical University of Denmark;
[0566] Protein Prowler Subcellular Localisation Predictor version 1.2 hosted on the server of the Institute for Molecular Bioscience, University of Queensland, Brisbane, Australia;
[0567] PENCE Proteome Analyst PA-GOSUB 2.5 hosted on the server of the University of Alberta, Edmonton, Alberta, Canada;
[0568] TMHMM, hosted on the server of the Technical University of Denmark
[0569] PSORT (URL: psort.org)

### Example 8

### Functional Assays

### 8.1. ODC Sequences

[0570] The ornithine decarboxylase activity of SEQ ID NO: 2 is tested according to Plant Physiol. Vol. 116, 1998. Briefly, decarboxilation of readiollabelled ornthine in transgenic cells is measured over a period of 24 h. The incorporation of [U-14C]Orn into labeled putrescine is measured using a scintillation counter. A modified procedure from Minocha et al. (1994) suitable to TLC (thin-layer chromatography) separation using larger quantities of tissue is used for dansylation and quantitation of polyamines.

### 8.2. BIHD1 Sequences

[0571] BIHD1 polypeptides useful in the methods of the present invention (at least in their native form) typically, but not necessarily, have transcriptional regulatory activity. DNA-binding activity may readily be determined in vitro or in vivo using techniques well known in the art (for example in Current Protocols in Molecular Biology, Volumes 1 and 2, Ausubel et al. (1994), Current Protocols). The recombinant BIHD1 from Oryza sativa expressed in Escherichia coli binds to the TGTCA motif that is the characteristic cis-element DNA sequence of the homeodomain transcription factors (Luo et al. (2005) supra).

### 8.3. MYB30 Sequences

[0572] MYB30 protein activity can be assayed as described by Li and Parish (1995). The MYB30 coding sequence is cloned in frame with the T7 gene 10 leader sequence and expressed in E. coli. The proteins are purified and analysed in a mobility retardation assay, using ³²P-labeled c-myb binding site (MBS) and the binding site of the maize P gene product (PBS). In this way, the binding properties of MYB30 polypeptides and portions thereof to MBS and PBS site is determined.

### 8.4. THOM Polypeptides

[0573] Electrophoretic mobility shift assays may be performed according to Meijer et al. (2000) and Meijer et al. (Plant J. 11, 263-276, 1997), exemplified with rice HD-Zip proteins: HD-Zip cDNA sequences were cloned in-frame with the GST-encoding sequence in an E. coli expression vector. Overnight E. coli cultures (100 ml) containing the expression constructs were induced by addition of IPTG to 0.1 mM. After 2 hrs of growth at 37° C., cells were pelleted, resuspended in 1 ml of NET-N buffer (20 mM TRIS-HCl pH 8.0, 100 mM NaCl, 1 mM EDTA, 0.5% Nonidet-P40, 1 mM PMSF, 0.5 μM trypsin inhibitor, 1 μM leupeptin), and lysed by mild sonication. Following centrifugation, 400 μl of the clarified extract was added to 150 μl of a 50% glutathione-Sepharose 4B (Pharmacia) slurry in NET-N buffer. After 60-min incubation at 4° C., the Sepharose beads were washed four times with NET-N buffer. GST fusion proteins were then eluted by incubation for 15 min at room temperature with 300 μl of reduced glutathione (10 mM) in 50 mM TRIS-HCl buffer pH 8, and frozen in liquid nitrogen after addition of glycerol to 10%. EMSA reactions contained 3 μg E. coli protein extract, 0.1 ng ³²P-end-labeled probe AH1 (CAATAATTG), variable amounts of competitor DNAs and 3 μg poly-(dldC)-poly-(dldC) in 10 1 μl nuclear extraction buffer. The reaction mixtures were incubated for 20 min at room temperature and subsequently loaded under tension (10 V cm⁻¹) on 5% acrylamide/bisacrylamide (37.5:1) gels in 0.5× Tris-borate/EDTA buffer. Gels were dried on Whatman DE81 paper and autoradiographed.

### 8.5. BIHD2 Sequences

[0574] BIHD2 polypeptides useful in the methods of the present invention (at least in their native form) typically, but not necessarily, have transcriptional regulatory activity. DNA-binding activity may readily be determined in vitro or in vivo using techniques well known in the art (for example in Current Protocols in Molecular Biology, Volumes 1 and 2, Ausubel et al. (1994), Current Protocols). The recombinant BIHD1 from Oryza sativa expressed in Escherichia coli binds to the TGTCA motif that is the characteristic cis-element DNA sequence of the homeodomain transcription factors (Luo et al. (2005) supra).

### Example 9

### Gene Cloning and Expression Vector Construction

[0575] Unless otherwise stated, recombinant DNA techniques are performed according to standard protocols described in (Sambrook (2001) Molecular Cloning: a laboratory manual, 3rd Edition Cold Spring Harbor Laboratory Press, CSH, New York) or in Volumes 1 and 2 of Ausubel et al. (1994), Current Protocols in Molecular Biology, Current Protocols. Standard materials and methods for plant molecular work are described in Plant Molecular Biology Labfax (1993) by R. D. D. Croy, published by BIOS Scientific Publications Ltd (UK) and Blackwell Scientific Publications (UK).

### 9.1. ODC Sequences

[0576] The nucleic acid sequence used in the methods of the invention was amplified by PCR using as template a custom-made Nicotiana tabacum seedlings cDNA library. PCR was performed using Hifi Taq DNA polymerase in standard conditions, using 200 ng of template in a 50 μl PCR mix. The primers used were SEQ ID NO: 59; sense: 5′-ggggacaagtttgtacaaaaaag caggcttaaacaatggccggccaaaca-3′ and SEQ ID NO: 60; reverse, complementary: 5′-ggggaccactttgtacaagaaagctgggttacaggtggttcatcagcttg-3′, which include the AttB sites for Gateway recombination. The amplified PCR fragment was purified also using standard methods. The first step of the Gateway procedure, the BP reaction, was then performed, during which the PCR fragment recombines in vivo with the pDONR201 plasmid to produce, according to the Gateway terminology, an “entry clone”, p Nicta_ODC. Plasmid pDONR201 was purchased from Invitrogen, as part of the Gateway® technology.

[0577] The entry clone comprising SEQ ID NO: 1 was then used in an LR reaction with a destination vector used for Oryza sativa transformation. This vector contained as functional elements within the T-DNA borders: a plant selectable marker; a screenable marker expression cassette; and a Gateway cassette intended for LR in vivo recombination with the nucleic acid sequence of interest already cloned in the entry clone. A rice GOS2 promoter (SEQ ID NO: 61) for constitutive expression was located upstream of this Gateway cassette.

[0578] After the LR recombination step, the resulting expression vector pGOS2::Nicta_ODC (FIG. 3) was transformed into Agrobacterium strain LBA4044 according to methods well known in the art.

[0579] Similarly to the cloning procedure described above, SEQ ID NO: 62 was amplified by PCR using as template a custom-made Chlamydomonas reinhardtii cDNA library. The primers used were: 5′-ggggacaagtttgtacaaaaaagcaggcttaaacaatggaaggaattgccaactc-3′ (sense) and 5′-ggggaccactttgtacaagaaagctgggtaatcgcgaagtgctgtcac-3′ (complementary). SEQ ID NO: 62 was transferred by an LR recombination step to the expression vector pGOS2:Chlre_ODC, where the expression of Chlre_ODC is under the control of the GOS2 promoter.

### 9.2. BIHD1 Sequences

[0580] The Oryza sativa cDNA encoding a BIHD1 polypeptide sequence as represented by SEQ ID NO: 2 was amplified by PCR using as template cDNA synthesized from mRNA extracted from Orysa sativa at different stages of growth, and under different growth conditions. The following primers, which include the AttB sites for Gateway recombination, were used for PCR amplification: prm08627 (SEQ ID NO: 68, sense): 5′-ggggacaagtttgtacaaaaaagcagg cttaaacaatggctacttactactcgag-3′ and prm08628 (SEQ ID NO: 69, reverse, complementary): 5′-ggggaccactttgtacaagaaagctgggtttaggccacaaaatcat-3′.

[0581] PCR was performed using Hifi Taq DNA polymerase in standard conditions. A PCR fragment of the expected length (including attB sites) was amplified and purified also using standard methods. The first step of the Gateway procedure, the BP reaction, was then performed, during which the PCR fragment recombined in vivo with the pDONR201 plasmid to produce, according to the Gateway terminology, an “entry clone”. Plasmid pDONR201 was purchased from Invitrogen, as part of the Gateway® technology.

[0582] The entry clone comprising SEQ ID NO: 66 was subsequently used in an LR reaction with a destination vector used for Oryza sativa transformation. This vector contained as functional elements within the T-DNA borders: a plant selectable marker; a screenable marker expression cassette; and a Gateway cassette intended for LR in vivo recombination with the nucleic acid sequence of interest already cloned in the entry clone. Two expression vectors differing the A rice WSI18 promoter (SEQ ID NO: 84) for late embryo specific expression was located upstream of this Gateway cassette. In a second expression vector, another promoter, a rice RAB21 promoter (SEQ ID NO: 85) for seed-specific expression, was located upstream of the Gateway cassette.

[0583] After the LR recombination step, the resulting expression vectors for seed-specific expression (FIG. 5) were independently transformed into Agrobacterium strain LBA4044 according to methods well known in the art.

### 9.3. MYB30 Sequences

[0584] The nucleic acid sequence of MYB30_{—}1 was amplified by PCR using as template a custom-made Arabidopsis thaliana seedlings cDNA library (in pCMV Sport 6.0; Invitrogen, Paisley, UK). PCR was performed using Hifi Taq DNA polymerase in standard conditions, using 200 ng of template in a 50 μl PCR mix. The primers used were SEQ ID NO: 116 (sense): 5′-ggggaccactttgtacaagaaagctgggtccatgtgattaaagcaaactcttca-3′ and SEQ ID NO: 117 (reverse, complementary): 5′-ggggaccactttgtacaagaaagctgggtccat gtgattaaagcaaactcttca-3′, which include the AttB sites for Gateway recombination. The amplified PCR fragment was purified, also using standard methods. The first step of the Gateway procedure, the BP reaction, was then performed, during which the PCR fragment recombines in vivo with the pDONR201 plasmid to produce, according to the Gateway terminology, an “entry clone”, pMYB30. Plasmid pDONR201 was purchased from Invitrogen, as part of the Gateway® technology.

[0585] The entry clone comprising SEQ ID NO: 88 was then used in an LR reaction with a destination vector used for Oryza sativa transformation. This vector contained as functional elements within the T-DNA borders: a plant selectable marker; a screenable marker expression cassette; and a Gateway cassette intended for LR in vivo recombination with the nucleic acid sequence of interest already cloned in the entry clone. A rice protochlorophyllide reductase promoter (pPcR) (SEQ ID NO: 118) for expression in green tissue was located upstream of this Gateway cassette.

[0586] After the LR recombination step, the resulting expression vector pPcR::MYB30 (FIG. 10) was transformed into Agrobacterium strain LBA4044 according to methods well known in the art.

### 9.4. THOM Polypeptides

[0587] The nucleic acid sequence used in the methods of the invention was amplified by PCR using as template a custom-made tomato seedlings cDNA library (in pCMV Sport 6.0; Invitrogen, Paisley, UK). PCR was performed using Hifi Taq DNA polymerase in standard conditions, using 200 ng of template in a 50 μl PCR mix. The primers used were prm10162 (SEQ ID NO: 132; sense, start codon in bold): 5′-gggacaagtttgtacaaaaaagcaggcttaaacaatgag tagtgaaaaagaagatgg-3′ and prm10163 (SEQ ID NO: 133; reverse, complementary): 5′-ggggaccactttgtacaagaaagctgggtacggatccatatttatctttc-3′, which include the AttB sites for Gateway recombination. The amplified PCR fragment was purified also using standard methods. The first step of the Gateway procedure, the BP reaction, was then performed, during which the PCR fragment recombined in vivo with the pDONR201 plasmid to produce, according to the Gateway terminology, an “entry clone”, pTHOM. Plasmid pDONR201 was purchased from Invitrogen, as part of the Gateway® technology.

[0588] The entry clone comprising SEQ ID NO: 122 was then used in an LR reaction with a destination vector used for Oryza sativa transformation. This vector contained as functional elements within the T-DNA borders: a plant selectable marker; a screenable marker expression cassette; and a Gateway cassette intended for LR in vivo recombination with the nucleic acid sequence of interest already cloned in the entry clone. A rice GOS2 promoter (SEQ ID NO: 131) for constitutive specific expression was located upstream of this Gateway cassette.

[0589] After the LR recombination step, the resulting expression vector pGOS2::THOM (FIG. 13) was transformed into Agrobacterium strain LBA4044 according to methods well known in the art.

[0590] 9.5. BIHD2 Polypeptides

[0591] The Medicago sativa cDNA encoding a BIHD2 polynucleotide sequence as represented by SEQ ID NO: 193 was amplified by PCR using as template cDNA synthesized from mRNA extracted from Medicago sativa at different stages of growth, and under different growth conditions. The following primers, which include the AttB sites for Gateway recombination, were used for PCR amplification: prm08627 (SEQ ID NO: 212, sense): 5′-ggggacaagttt gtacaaaaaagcaggcttaaacaatggctgaggagggtttt-3′ and prm08628 (SEQ ID NO: 213, reverse, complementary): 5′-ggggaccactttgtacaagaaagctgggtttgcttagtta gtggattgaagat-3′. PCR was performed using Hifi Taq DNA polymerase in standard conditions. A PCR fragment of the expected length (including attB sites) was amplified and purified also using standard methods. The first step of the Gateway procedure, the BP reaction, was then performed, during which the PCR fragment recombined in vivo with the pDONR201 plasmid to produce, according to the Gateway terminology, an “entry clone”. Plasmid pDONR201 was purchased from Invitrogen, as part of the Gateway® technology.

[0592] The entry clone comprising SEQ ID NO: 192 was subsequently used in an LR reaction with a destination vector used for Oryza sativa transformation. This vector contained as functional elements within the T-DNA borders: a plant selectable marker; a screenable marker expression cassette; and a Gateway cassette intended for LR in vivo recombination with the nucleic acid sequence of interest already cloned in the entry clone. A expression vector differing the GOS 2 promoter (SEQ ID NO: 245) for late embryo specific expression was located upstream of this Gateway cassette.

[0593] After the LR recombination step, the resulting expression vector for constitutive expression (FIG. 15) were independently transformed into Agrobacterium strain LBA4044 according to methods well known in the art.

### Example 10

### Plant Transformation

### Rice Transformation

[0594] The Agrobacterium containing the expression vector was used to transform Oryza sativa plants. Mature dry seeds of the rice japonica cultivar Nipponbare were dehusked. Sterilization was carried out by incubating for one minute in 70% ethanol, followed by 30 minutes in 0.2% HgCl₂, followed by a 6 times 15 minutes wash with sterile distilled water. The sterile seeds were then germinated on a medium containing 2,4-D (callus induction medium). After incubation in the dark for four weeks, embryogenic, scutellum-derived calli were excised and propagated on the same medium. After two weeks, the calli were multiplied or propagated by subculture on the same medium for another 2 weeks. Embryogenic callus pieces were sub-cultured on fresh medium 3 days before co-cultivation (to boost cell division activity).

[0595] Agrobacterium strain LBA4404 containing the expression vector was used for co-cultivation. Agrobacterium was inoculated on AB medium with the appropriate antibiotics and cultured for 3 days at 28° C. The bacteria were then collected and suspended in liquid co-cultivation medium to a density (OD₆₀₀) of about 1. The suspension was then transferred to a Petri dish and the calli immersed in the suspension for 15 minutes. The callus tissues were then blotted dry on a filter paper and transferred to solidified, co-cultivation medium and incubated for 3 days in the dark at 25° C. Co-cultivated calli were grown on 2,4-D-containing medium for 4 weeks in the dark at 28° C. in the presence of a selection agent. During this period, rapidly growing resistant callus islands developed. After transfer of this material to a regeneration medium and incubation in the light, the embryogenic potential was released and shoots developed in the next four to five weeks. Shoots were excised from the calli and incubated for 2 to 3 weeks on an auxin-containing medium from which they were transferred to soil. Hardened shoots were grown under high humidity and short days in a greenhouse.

[0596] Approximately 35 independent TO rice transformants were generated for one construct. The primary transformants were transferred from a tissue culture chamber to a greenhouse. After a quantitative PCR analysis to verify copy number of the T-DNA insert, only single copy transgenic plants that exhibit tolerance to the selection agent were kept for harvest of T1 seed. Seeds were then harvested three to five months after transplanting. The method yielded single locus transformants at a rate of over 50% (Aldemita and Hodges1996, Chan et al. 1993, Hiei et al. 1994).

### Corn Transformation

[0597] Transformation of maize (Zea mays) is performed with a modification of the method described by Ishida et al. (1996) Nature Biotech 14(6): 745-50. Transformation is genotype-dependent in corn and only specific genotypes are amenable to transformation and regeneration. The inbred line A188 (University of Minnesota) or hybrids with A188 as a parent are good sources of donor material for transformation, but other genotypes can be used successfully as well. Ears are harvested from corn plant approximately 11 days after pollination (DAP) when the length of the immature embryo is about 1 to 1.2 mm. Immature embryos are cocultivated with Agrobacterium tumefaciens containing the expression vector, and transgenic plants are recovered through organogenesis. Excised embryos are grown on callus induction medium, then maize regeneration medium, containing the selection agent (for example imidazolinone but various selection markers can be used). The Petri plates are incubated in the light at 25° C. for 2-3 weeks, or until shoots develop. The green shoots are transferred from each embryo to maize rooting medium and incubated at 25° C. for 2-3 weeks, until roots develop. The rooted shoots are transplanted to soil in the greenhouse. T1 seeds are produced from plants that exhibit tolerance to the selection agent and that contain a single copy of the T-DNA insert.

### Wheat Transformation

[0598] Transformation of wheat is performed with the method described by Ishida et al. (1996) Nature Biotech 14(6): 745-50. The cultivar Bobwhite (available from CIMMYT, Mexico) is commonly used in transformation. Immature embryos are co-cultivated with Agrobacterium tumefaciens containing the expression vector, and transgenic plants are recovered through organogenesis. After incubation with Agrobacterium, the embryos are grown in vitro on callus induction medium, then regeneration medium, containing the selection agent (for example imidazolinone but various selection markers can be used). The Petri plates are incubated in the light at 25° C. for 2-3 weeks, or until shoots develop. The green shoots are transferred from each embryo to rooting medium and incubated at 25° C. for 2-3 weeks, until roots develop. The rooted shoots are transplanted to soil in the greenhouse. T1 seeds are produced from plants that exhibit tolerance to the selection agent and that contain a single copy of the T-DNA insert.

### Soybean Transformation

[0599] Soybean is transformed according to a modification of the method described in the Texas A&M U.S. Pat. No. 5,164,310. Several commercial soybean varieties are amenable to transformation by this method. The cultivar Jack (available from the Illinois Seed foundation) is commonly used for transformation. Soybean seeds are sterilised for in vitro sowing. The hypocotyl, the radicle and one cotyledon are excised from seven-day old young seedlings. The epicotyl and the remaining cotyledon are further grown to develop axillary nodes. These axillary nodes are excised and incubated with Agrobacterium tumefaciens containing the expression vector. After the cocultivation treatment, the explants are washed and transferred to selection media. Regenerated shoots are excised and placed on a shoot elongation medium. Shoots no longer than 1 cm are placed on rooting medium until roots develop. The rooted shoots are transplanted to soil in the greenhouse. T1 seeds are produced from plants that exhibit tolerance to the selection agent and that contain a single copy of the T-DNA insert.

### Rapeseed/Canola Transformation

[0600] Cotyledonary petioles and hypocotyls of 5-6 day old young seedling are used as explants for tissue culture and transformed according to Babic et al. (1998, Plant Cell Rep 17: 183-188). The commercial cultivar Westar (Agriculture Canada) is the standard variety used for transformation, but other varieties can also be used. Canola seeds are surface-sterilized for in vitro sowing. The cotyledon petiole explants with the cotyledon attached are excised from the in vitro seedlings, and inoculated with Agrobacterium (containing the expression vector) by dipping the cut end of the petiole explant into the bacterial suspension. The explants are then cultured for 2 days on MSBAP-3 medium containing 3 mg/l BAP, 3% sucrose, 0.7% Phytagar at 23° C., 16 hr light. After two days of co-cultivation with Agrobacterium, the petiole explants are transferred to MSBAP-3 medium containing 3 mg/l BAP, cefotaxime, carbenicillin, or timentin (300 mg/l) for 7 days, and then cultured on MSBAP-3 medium with cefotaxime, carbenicillin, or timentin and selection agent until shoot regeneration. When the shoots are 5-10 mm in length, they are cut and transferred to shoot elongation medium (MSBAP-0.5, containing 0.5 mg/l BAP). Shoots of about 2 cm in length are transferred to the rooting medium (MSO) for root induction. The rooted shoots are transplanted to soil in the greenhouse. T1 seeds are produced from plants that exhibit tolerance to the selection agent and that contain a single copy of the T-DNA insert.

### Alfalfa Transformation

[0601] A regenerating clone of alfalfa (Medicago sativa) is transformed using the method of (McKersie et al., 1999 Plant Physiol 119: 839-847). Regeneration and transformation of alfalfa is genotype dependent and therefore a regenerating plant is required. Methods to obtain regenerating plants have been described. For example, these can be selected from the cultivar Rangelander (Agriculture Canada) or any other commercial alfalfa variety as described by Brown D C W and A Atanassov (1985. Plant Cell Tissue Organ Culture 4: 111-112). Alternatively, the RA3 variety (University of Wisconsin) has been selected for use in tissue culture (Walker et al., 1978 μm J Bot 65:654-659). Petiole explants are cocultivated with an overnight culture of Agrobacterium tumefaciens C58C1 pMP90 (McKersie et al., 1999 Plant Physiol 119: 839-847) or LBA4404 containing the expression vector. The explants are cocultivated for 3 d in the dark on SH induction medium containing 288 mg/L Pro, 53 mg/L thioproline, 4.35 g/L K2SO4, and 100 μm acetosyringinone. The explants are washed in half-strength Murashige-Skoog medium (Murashige and Skoog, 1962) and plated on the same SH induction medium without acetosyringinone but with a suitable selection agent and suitable antibiotic to inhibit Agrobacterium growth. After several weeks, somatic embryos are transferred to BOi2Y development medium containing no growth regulators, no antibiotics, and 50 g/L sucrose. Somatic embryos are subsequently germinated on half-strength Murashige-Skoog medium. Rooted seedlings were transplanted into pots and grown in a greenhouse. T1 seeds are produced from plants that exhibit tolerance to the selection agent and that contain a single copy of the T-DNA insert.

### Cotton Transformation

[0602] Cotton is transformed using Agrobacterium tumefaciens according to the method described in U.S. Pat. No. 5,159,135. Cotton seeds are surface sterilised in 3% sodium hypochlorite solution during 20 minutes and washed in distilled water with 500 μg/ml cefotaxime. The seeds are then transferred to SH-medium with 50 μg/ml benomyl for germination. Hypocotyls of 4 to 6 days old seedlings are removed, cut into 0.5 cm pieces and are placed on 0.8% agar. An Agrobacterium suspension (approx. 108 cells per ml, diluted from an overnight culture transformed with the gene of interest and suitable selection markers) is used for inoculation of the hypocotyl explants. After 3 days at room temperature and lighting, the tissues are transferred to a solid medium (1.6 g/l Gelrite) with Murashige and Skoog salts with B4 vitamins (Gamborg et al., Exp. Cell Res. 50:151-158 (1968)), 0.1 mg/l 2,4-D, 0.1 mg/l 6-furfurylaminopurine and 750 μg/ml MgCL2, and with 50 to 100 μg/ml cefotaxime and 400-500 μg/ml carbenicillin to kill residual bacteria. Individual cell lines are isolated after two to three months (with subcultures every four to six weeks) and are further cultivated on selective medium for tissue amplification (30° C., 16 hr photoperiod). Transformed tissues are subsequently further cultivated on non-selective medium during 2 to 3 months to give rise to somatic embryos. Healthy looking embryos of at least 4 mm length are transferred to tubes with SH medium in fine vermiculite, supplemented with 0.1 mg/l indole acetic acid, 6 furfurylaminopurine and gibberellic acid. The embryos are cultivated at 30° C. with a photoperiod of 16 hrs, and plantlets at the 2 to 3 leaf stage are transferred to pots with vermiculite and nutrients. The plants are hardened and subsequently moved to the greenhouse for further cultivation.

### Example 11

### Phenotypic Evaluation Procedure

### 11.1 Evaluation Setup

[0603] Approximately 35 independent TO rice transformants were generated. The primary transformants were transferred from a tissue culture chamber to a greenhouse for growing and harvest of T1 seed. Six events, of which the T1 progeny segregated 3:1 for presence/absence of the transgene, were retained. For each of these events, approximately 10 T1 seedlings containing the transgene (hetero- and homo-zygotes) and approximately 10 T1 seedlings lacking the transgene (nullizygotes) were selected by monitoring visual marker expression. The transgenic plants and the corresponding nullizygotes were grown side-by-side at random positions. Greenhouse conditions were of shorts days (12 hours light), 28° C. in the light and 22° C. in the dark, and a relative humidity of 70%. Plants grown under non-stress conditions were watered at regular intervals to ensure that water and nutrients are not limiting to satisfy plant needs to complete growth and development.

[0604] Four T1 events were further evaluated in the T2 generation following the same evaluation procedure as for the T1 generation but with more individuals per event. From the stage of sowing until the stage of maturity the plants were passed several times through a digital imaging cabinet. At each time point digital images (2048×1536 pixels, 16 million colours) were taken of each plant from at least 6 different angles.

### Drought Screen

[0605] Plants from T2 seeds are grown in potting soil under normal conditions until they approach the heading stage. They are then transferred to a “dry” section where irrigation is withheld. Humidity probes are inserted in randomly chosen pots to monitor the soil water content (SWC). When SWC falls below certain thresholds, the plants are automatically re-watered continuously until a normal level is reached again. The plants are then re-transferred to normal conditions. The rest of the cultivation (plant maturation, seed harvest) is the same as for plants not grown under abiotic stress conditions. Growth and yield parameters are recorded as detailed for growth under normal conditions.

### Nitrogen Use Efficiency Screen

[0606] Rice plants from T2 seeds are grown in potting soil under normal conditions except for the nutrient solution. The pots are watered from transplantation to maturation with a specific nutrient solution containing reduced N nitrogen (N) content, usually between 7 to 8 times less. The rest of the cultivation (plant maturation, seed harvest) is the same as for plants not grown under abiotic stress. Growth and yield parameters are recorded as detailed for growth under normal conditions.

### Salt Stress Screen

[0607] Plants are grown on a substrate made of coco fibers and argex (3 to 1 ratio). A normal nutrient solution is used during the first two weeks after transplanting the plantlets in the greenhouse. After the first two weeks, 25 mM of salt (NaCl) is added to the nutrient solution, until the plants are harvested. Seed-related parameters are then measured.

### 11.2 Statistical Analysis: F Test

[0608] A two factor ANOVA (analysis of variants) was used as a statistical model for the overall evaluation of plant phenotypic characteristics. An F test was carried out on all the parameters measured of all the plants of all the events transformed with the gene of the present invention. The F test was carried out to check for an effect of the gene over all the transformation events and to verify for an overall effect of the gene, also known as a global gene effect. The threshold for significance for a true global gene effect was set at a 5% probability level for the F test. A significant F test value points to a gene effect, meaning that it is not only the mere presence or position of the gene that is causing the differences in phenotype.

[0609] Because two experiments with overlapping events were carried out, a combined analysis was performed. This is useful to check consistency of the effects over the two experiments, and if this is the case, to accumulate evidence from both experiments in order to increase confidence in the conclusion. The method used was a mixed-model approach that takes into account the multilevel structure of the data (i.e. experiment—event—segregants). P values were obtained by comparing likelihood ratio test to chi square distributions.

### 11.3 Parameters Measured

### Biomass-Related Parameter Measurement

[0610] From the stage of sowing until the stage of maturity the plants were passed several times through a digital imaging cabinet. At each time point digital images (2048×1536 pixels, 16 million colours) were taken of each plant from at least 6 different angles.

[0611] The plant aboveground area (or leafy biomass) was determined by counting the total number of pixels on the digital images from aboveground plant parts discriminated from the background. This value was averaged for the pictures taken on the same time point from the different angles and was converted to a physical surface value expressed in square mm by calibration. Experiments show that the aboveground plant area measured this way correlates with the biomass of plant parts above ground. The above ground area is the area measured at the time point at which the plant had reached its maximal leafy biomass. The early vigour is the plant (seedling) aboveground area three weeks post-germination. Increase in root biomass is expressed as an increase in total root biomass (measured as maximum biomass of roots observed during the lifespan of a plant); or as an increase in the root/shoot index (measured as the ratio between root mass and shoot mass in the period of active growth of root and shoot).

[0612] Early vigour was determined by counting the total number of pixels from aboveground plant parts discriminated from the background. This value was averaged for the pictures taken on the same time point from different angles and was converted to a physical surface value expressed in square mm by calibration. The results described below are for plants three weeks post-germination.

### Seed-Related Parameter Measurements

[0613] The mature primary panicles were harvested, counted, bagged, barcode-labelled and then dried for three days in an oven at 37° C. The panicles were then threshed and all the seeds were collected and counted. The filled husks were separated from the empty ones using an air-blowing device. The empty husks were discarded and the remaining fraction was counted again. The filled husks were weighed on an analytical balance. The number of filled seeds was determined by counting the number of filled husks that remained after the separation step. The total seed yield was measured by weighing all filled husks harvested from a plant. Total seed number per plant was measured by counting the number of husks harvested from a plant. Thousand Kernel Weight (TKW) is extrapolated from the number of filled seeds counted and their total weight. The Harvest Index (HI) in the present invention is defined as the ratio between the total seed yield and the above ground area (mm²), multiplied by a factor 10⁶. The total number of flowers per panicle as defined in the present invention is the ratio between the total number of seeds and the number of mature primary panicles. The seed fill rate as defined in the present invention is the proportion (expressed as a %) of the number of filled seeds over the total number of seeds (or florets).

### Example 12

### Results of the Phenotypic Evaluation of the Transgenic Plants

### 12.1 ODC Sequences

[0614] The results of the evaluation of transgenic rice plants expressing a Nicta_ODC acid (SEQ ID NO: 1) nucleic under non-stress conditions as evaluated in T1 and T2 generation are presented below. An increase of at least 5% was observed for aboveground biomass (AreaMax), emergence vigour (early vigour or EmerVigor), total seed yield, number of filled seeds, and total number of seeds per (Table F1).

TABLE F1

| Parameter | % Increase in transgenic compared to control plant |
|---|---|
| AreaMax | 11 |
| EmerVigor | 30 |
| totalwgseeds | 12 |
| nrfilledseed | 11 |
| nrtotalseed | 14 |

### Nitrogen Use Efficiency Screen

[0615] Rice plants from T2 seeds were grown in potting soil under normal conditions except for the nutrient solution. The pots were watered from transplantation to maturation with a specific nutrient solution containing reduced N nitrogen (N) content, usually between 7 to 8 times less. The rest of the cultivation (plant maturation, seed harvest) was the same as for plants not grown under abiotic stress. Growth and yield parameters were recorded as detailed for growth under normal conditions.

[0616] The results of the evaluation of transgenic rice plants expressing Chlre_ODC nucleic acid (SEQ ID NO: 62) under the conditions of the Nitrogen use efficiency are presented hereunder (Table F2). An increase was observed for total seed weight, number of filled seeds, fill rate, harvest index and thousand-kernel weight

TABLE F2
Evaluation of transgenic plants transformed with pChlre_ODC.

| | % increase in transgenic |
|---|---|
| Parameter | compared to control plant |
| AreaMax | 30.8 |
| EmerVigor | 33.4 |
| totalwgseeds | 23.66 |
| nrfilledseed | 24.7 |
| flowerperpan | 9.9 |
| harvestindex | 7.2 |
| firstpan | 14.77 |
| HeightMax | 13.5 |
| GNbfFlow | 9.3 |
| nrtotalseed | 24.9 |

### 13.2. BIHD1 Sequences

### Under the Control of a Rice WSI18 Promoter

[0617] The results of the evaluation of T2 generation transgenic rice plants expressing a nucleic acid sequence encoding a BIHD1 polypeptide as represented by SEQ ID NO: 67, under the control of a WSI18 promoter for seed-specific expression, and grown under normal growth conditions, are presented below.

[0618] There was an increase in the early vigor, in the total seed yield per plant, in the number of filled seeds, in the total number of seeds, and in the harvest index of the transgenic plants compared to corresponding nullizygotes (controls), as shown in Table G.

TABLE G
Results of the evaluation of T2 generation transgenic rice plants
expressing a nucleic acid sequence encoding a BIHD1 polypeptide
as represented by SEQ ID NO: 67, under the control of a WSI18
promoter for seed-specific expression.

| | Overall average % increase in 4 |
|---|---|
| Trait | events in the T2 generation |
| Early vigor | 24% |
| Total seed yield per plant | 13% |
| Number of filled seeds | 14% |
| Total number of seeds | 13% |
| Harvest index | 8% |

### Under the Control of a Rice RAB21 Promoter

[0619] Transgenic rice plants expressing a nucleic acid sequence encoding a BIHD1 polypeptide as represented by SEQ ID NO: 67, under the control of a rice RAB21 promoter for seed-specific expression, showed a positive tendency for the following yield-related traits: early vigor, total seed yield per plant, number of filled seeds, total number of seeds, and harvest index.

### 13.3. MYB30 Sequences

[0620] Plants from T2 seeds were grown in potting soil under normal conditions until they approached the heading stage. They were then transferred to a “dry” section where irrigation was withheld. Humidity probes were inserted in randomly chosen pots to monitor the soil water content (SWC). When SWC failed below certain thresholds, the plants were automatically re-watered continuously until a normal level was reached again. The plants were then re-transferred to normal conditions. The rest of the cultivation (plant maturation, seed harvest) was the same as for plants not grown under abiotic stress conditions. Growth and yield parameters were recorded as detailed for growth under normal conditions.

[0621] The results of the evaluation of transgenic rice plants expressing an MYB30 nucleic acid under drought-stress conditions described above are presented hereunder. An overall increase of more than 5% for aboveground biomass (AreaMax) and for emergence vigour (early vigour) was revealed (Table H).

TABLE H
Results of the evaluation of transgenic rice plants expressing an
MYB30 nucleic acid

| Parameter | % increase in the transgenics versus the nullizygous control |
|---|---|
| Emervigor | 19.9 |

### 13.4. THOM Sequences

[0622] The results of the evaluation of transgenic rice plants expressing a THOM nucleic acid under non-stress conditions are presented below. A significant increase was observed for total seed yield, number of filled seeds, harvest index, and Thousand Kernel Weight (Table I).

TABLE I

| | T1 plants | T2 plants |
|---|---|---|
| Parameter | Overall % increase | Overall % increase |
| total seed yield | 20.3 | 39.7 |
| number of filled seeds | 16.9 | 30.4 |
| harvest index | 11.3 | 11.8 |
| Thousand Kernel Weight | 2.6 | 2.4 |

### 13.5. BIHD2 Polypeptides

### Drought Screen

[0623] Plants from T2 seeds were grown in potting soil under normal conditions until they approached the heading stage. They were then transferred to a “dry” section where irrigation was withheld. Humidity probes were inserted in randomly chosen pots to monitor the soil water content (SWC). When SWC failed below certain thresholds, the plants were automatically re-watered continuously until a normal level was reached again. The plants were then re-transferred to normal conditions. The rest of the cultivation (plant maturation, seed harvest) was the same as for plants not grown under abiotic stress conditions. Growth and yield parameters were recorded as detailed for growth under normal conditions.

### Under the Control of the GOS2 Promoter

[0624] The results of the evaluation of T1 generation transgenic rice plants expressing a nucleic acid sequence encoding a BIHD2 polypeptide as represented by SEQ ID NO: 193, under the control of athe rice GOS2 promoter for constitutive expression, and grown under the drought screen conditions as detailed above are presented below (Table J).

TABLE J

| Yield trait | % increase in transgenic compared to control plants |
|---|---|
| TimetoFlower | 5.3 |
| totalwgseeds | 37.1 |
| fillrate | 54.9 |
| harvestindex | 49.0 |
| nrfilledseed | 31.1 |

1. A method for enhancing and/or increasing yield-related traits in plants relative to control plants, comprising modulating expression in a plant of a nucleic acid sequence encoding an Ornithine Decarboxylase polypeptide, or a benzothiadiazole-induced homeodomain 1 (BIHD1) polypeptide, which BIHD1 polypeptide has at least 50% amino acid sequence identity to a BIHD1 polypeptide as represented by SEQ ID NO: 67, or a MYB30 polypeptide, wherein said MYB30 polypeptide comprises at least one SANT domain, or a THOM polypeptide, wherein said THOM polypeptide comprises (i) an “N-terminal HD-ZIP” Leucine zipper domain (ii) a homeobox domain, (iii) a HALZ leucine zipper domain associated with the homeobox domain, or a benzothiadiazole-induced homeodomain 2 (BIHD2) polypeptide, which BIHD2 polypeptide has at least 50% amino acid sequence identity to a BIHD2 polypeptide as represented by SEQ ID NO: 193, and optionally selecting for plants having enhanced yield-related traits.

2. The method according to claim 1, wherein said Ornithine decarboxylase polypeptide, when used in the construction of a phylogenetic tree of alpha/beta-barrel fold basic amino acid decarboxylase polypeptides, clusters with the clades comprising Ornithine Decarboxylase rather than Arginine Decarboxylase, Diaminopimelate Decarboxylase, or Carboxynorspermidine Decarboxylase polypeptides.

3. The method according to claim 1, wherein said Ornithine Decarboxylase polypeptide comprises one or more of the following sequences:
(i) at least 30% sequence identity to the amino acid sequence of any of the polypeptides of Table A1;
(ii) at least 50% sequence identity to the amino acid sequence of any of the domains as set forth in Table C1 of Example 4;
(iii) at least 50% sequence identity to the amino acid sequence of Motif 1: [N/G]AR[C/V]P[L/M][G/S][P/L]K[Y/F]GALPEE[V/A]EPLL[R/Q][A/T]A[Q/K][A/E][A/L][G/R]LTV[S/V]GVSFH[V/I]GSG (SEQ ID NO: 51);
(iv) at least 50% sequence identity to the amino acid sequence of Motif 2: [K/D][D/Q][P/A]FYV[L/V]DL[G/A][E/V]VV[S/R]LMDQW[R/K/N][A/S] (SEQ ID NO: 52);
(v) at least 50% sequence identity to the amino acid sequence of Motif 3: RI[V/I][F/Y]ANPCK[P/R]ES[D/H]I[I/KIR][Y/F]AA[K/S]VGVNLTT[Y/F]DSE DE[V/L][Y/E]K[I/V][R/A/K]KHHP (SEQ ID NO: 53);
(vi) at least 50% sequence identity to the amino acid sequence of Motif 4: EY[W/Y]I[N/D]DG[L/V/I]YGS[F/M/L]NC[PV]L[Y/F]DHAT (SEQ ID NO: 54);
(vii) at least 50% sequence identity to the amino acid sequence of Motif 5: EYVLSLG[V/I]SPD (SEQ ID NO: 55);
(viii) at least 50% sequence identity to the amino acid sequence of Motif 6: AI[A/E]AA[K/R]EVF[E/D][T/A]A[A/S][K/Q/R][L/F]G[M/L][P/S][K/R/P]M[T/R]VL[D/N][I/V]GGGFT[S/A]G[H/P]QF[T/E][T/E]AA[A/V][A/K/V][V/I][K/N][S/A] (SEQ ID NO: 56);
(ix) at least 50% sequence identity to the amino acid sequence of Motif 7: [G/I]G[G/A]AP[P/T/V]AAAA[A/E][EN][N/D/G][G/H]TRKV[V/I]PLS[R/K]DA LQDFM[V/L]SIITQKLQD[E/D] (SEQ ID NO: 57);
(x) at least 50% sequence identity to the amino acid sequence of Motif 8: QT[V/I]IVSGLNPAAILQ (SEQ ID NO: 58).

4. The method according to claim 1, wherein said modulated expression is effected by introducing and expressing in a plant a nucleic acid encoding an Ornithine Decarboxylase polypeptide.

5. The method according to claim 1, wherein said nucleic acid encoding an Ornithine Decarboxylase polypeptide encodes any one of the proteins listed in Table A1 or is a portion of such a nucleic acid, or a nucleic acid capable of hybridising with such a nucleic acid or the complement thereof.

6. The method according to claim 1, wherein said nucleic acid sequence encodes an orthologue or paralogue of any of the proteins given in Table A1

7. The method according to claim 1, wherein said enhanced yield-related traits comprise increased shoot biomass and/or seed yield relative to control plants.

8. The method according to claim 1, wherein said enhanced yield-related traits are obtained under cultivation conditions of nitrogen deficiency.

9. The method according to claim 4, wherein said nucleic acid is operably linked to a constitutive promoter, preferably to a GOS2 promoter or a GOS2 promoter from rice.

10. The method according to claim 1, wherein said nucleic acid encoding an Ornithine Decarboxylase polypeptide is of plant origin, from a dicotyledonous plant, from a plant of the family Solanaceae, or from Nicotiana tabacum.

11. A plant or part thereof, including seeds, obtainable by the method according to claim 1, wherein said plant or part thereof comprises a recombinant nucleic acid encoding an Ornithine Decarboxylase polypeptide.

12. A construct comprising:
(i) the nucleic acid encoding an Ornithine Decarboxylase polypeptide as defined in claim 1;
(ii) one or more control sequences capable of driving expression of the nucleic acid sequence of (a); and optionally
(iii) a transcription termination sequence.

13. The construct according to claim 12, wherein one of said control sequences is a constitutive promoter, a GOS2 promoter, or a GOS2 promoter from rice.

14. A method for making plants having increased yield or increased seed yield relative to control plants, comprising utilizing the construct of claim 12.

15. A plant, plant part or plant cell transformed with the construct according to claim 12.

16. A method for the production of a transgenic plant having increased yield or increased seed yield relative to control plants, comprising:
(i) introducing and expressing in a plant the nucleic acid encoding an Ornithine Decarboxylase polypeptide as defined in claim 1; and
(ii) cultivating the plant cell under conditions promoting plant growth and development; and optionally
(iii) selecting for plants having enhanced yield-related traits.

17. A transgenic plant having increased yield or increased biomass, relative to control plants, resulting from modulated expression of the nucleic acid encoding an Ornithine Decarboxylase polypeptide as defined in claim 1, or a transgenic plant cell derived from said transgenic plant.

18. The transgenic plant according to claim 11, or a transgenic plant cell derived thereof, wherein said plant is a crop plant or a monocot or a cereal, such as rice, maize, wheat, barley, millet, rye, triticale, sorghum and oats.

19. Harvestable parts of the plant according to claim 18, wherein said harvestable parts are shoot biomass and/or seeds.

20. Products derived from the plant according to claim 18 and/or from harvestable parts of said plant.

21. A method for increasing yield or increasing shoot and/or biomass in plants, relative to control plants, comprising utilizing a nucleic acid encoding an Ornithine Decarboxylase polypeptide.

The application's sequence listing, which the Patent Office published only in electronic form, follows.

SEQUENCE LISTING (248 sequences)

SEQ ID NO: 1 - DNA, 1852 bp, Nicotiana tabacum
ccaccctccgggccgttgcttcacaacgttcaaatccgctcccggcggatttgtcctactcaggagagcgttcaccgacaaacaacagataaaacgaaaggcccagtcttccgactgagcctttcgttttatttgatgcctggcagttccctactctcgcgttaacgctagcatggatctcgggccccaaataatgattttattttgactgatagtgacctgttcgttgcaacaaattgatgagcaatgcttttttataatgccaactttgtacaaaaaagcaggcttaaacaatggccggccaaacaatcatcgtttccgggttgaacccggcggccattcttcagtccacaattggcggcggagcttctcctacagcggcggcggcggcggaaaacggcaccagaaaagtcatccctctctcaagagatgccttacaagatttcatgttatcaatcataacccaaaaattacaagatgagaaacaacctttttacgtgctagacttgggtgaggttgtttctcttatggaccaatggaaatctgctctcccaaatatccgtccattttacgctgttaaatgtaaccctgaaccgtcgttcctttcaatttatctgctatgggctcaaattttgattgtgctagccgagctgaaattgagtatgttttatctcttggcatttcacctgaccgtattgttttcgcaaatccatgcaaaccggaatccgatattattttgcagcaaaagttggggtgaatcttacaacctatgattctgaagacgaggtttacaagatccgaaagcatcacccgaaatccgaactcttgctccgcatcaagcccatgctcgacggcaacgcgagatgcccaatgggcccgaaatacggcgcgcttccagaagaagtcgacccgctgctccgggcagctcaagccgcccgtctcaccgtatccggcgtctcattccacatcggtagcggagatgccgattcaaacgcttatctcggcgccatagccgcggctaaggaagtgtttgaaacagctgctaaactcgggatgtcgaaaatgactgttctagacgtcggcggcgggtttacatccggccaccagttcacaaccgccgccgtcgccgttaaatcagctttaaaacaacacttcgatgacgaaccggagttgacaatcatagctgaaccgggtcggttttttgcagagacggcgtttactttggcaacgacgattatagggaaaagagtgaggggtgaattgagggagtattggattaacgacgggctgtacggttcgatgaactgtgtactttacgaccatgcgacggtgaatgcaacgccgttagctgttctgtcgaatcgtagtaacgttacctgcggcgggtcgaaaacgtttccgacgactgtgtttgggcccacttgtgatgctcttgatactgttttaagggattaccagttaccggagctgcaggttaatgattggctggtttttcctaatatgggtgcttatactaaagctgctgggtccaattttaatggatttaatacttccgccattgttactcacctcgcttattctttccaagctgatgaaccacctgtaacccagctttcttgtacaaagttggcattataagaaagcattgcttatcaatttgttgcaacgaacaggtcactatcagtcaaaataaaatcattatttgccatccagctgcagctctggcccgtgtctcaaaatctctgatgttacattgcacaagataaaaatatatcatcatgaacaataaaactgtctgcttacataaacagtaatacaaggggtgttatgagccatattcaacgggaaacgt

SEQ ID NO: 2 - protein, 433 aa, Nicotiana tabacum
MAGQTIIVSGLNPAAILQSTIGGGASPTAAAAAENGTRKVIPLSRDALQDFMLSIITQKLQDEKQPFYVLDLGEVVSLMDQWKSALPNIRPFYAVKCNPEPSFLSILSAMGSNFDCASRAEIEYVLSLGISPDRIVFANPCKPESDIIFAAKVGVNLTTYDSEDEVYKIRKHHPKSELLLRIKPMLDGNARCPMGPKYGALPEEVDPLLRAAQAARLTVSGVSFHIGSGDADSNAYLGAIAAAKEVFETAAKLGMSKMTVLDVGGGFTSGHQFTTAAVAVKSALKQHFDDEPELTIIAEPGRFFAETAFTLATTIIGKRVRGELREYWINDGLYGSMNCVLYDHATVNATPLAVLSNRSNVTCGGSKTFPTTVFGPTCDALDTVLRDYQLPELQVNDWLVFPNMGAYTKAAGSNFNGFNTSAIVTHLAYSYPS

SEQ ID NO: 3 - DNA, 1698 bp, Aureococcus anophagefferens
atgctcgacgtcgcgtccaagttctcgcggagcggcgagtcgccgcgcgagtcgccgcggtcgtcgcggccccgctccgggtcgctgtcgacggtgcaggccgacgcctggcggacgcgcgacgagcggctgcgctgcatcgcggcgagctggacggcgcgcgtcgaggccgaggtcgcggcggtcgcggcgcgcggcggcggcggcgcgccgcgcatcgcgcgcggcgcgtggcccggcgactggccgagccgcgcggcgcggcccgcggcggcggcggcgtcgcgcgccgcggcggcggcggcgccgccggcgccgtcgccgcgcggtccgcccgaggcccgcgccgtgcccaacggccgcgcctgcggcctgcgggactactgcgcgtccgtcgtcgccgcggcgccgcgcgactacgcgggcccgttctacgtcgtcgacgtgggcgcggccgagcggctctacgacgcctgggcggcggcgctgccccgcgtgcggccccactacgccgtcaagtgcttccccgacgcgggcctctgccgcgcgctcgcggcgaagggctgcggcttcgactgcgcgtccgaggccgagtgtaggctcgtcttcgcgtgcggcgcgacgccgcgcgacgtcgtcttcgcgaacccctgcaagcggccgagcgacgtgaacttcctcgcggcgagcggcgtgccctggacgaccttcgactgctgcgacgagctcgcgaagctcgcggggctcctccccggcgcgacgcgggccgtgctccggctccgctgcgacgacccgacgagccgcctacccttcgggcccaagtacggcgccctcgaggacgaggtgcccggcctcctcgccgcggcgcgcgcggcgggcgtggccgtcgcgggcgtgtcgttccacgtcggcagcggcgcgcggtcgcccgcggcgttcgccgcggcgatcgcggccgcgcggcgcgccttcgacgccaacgccgcggcgggcggggctcccttcgacgtgctcgacatcggcggcggcttctgcggcggcttcgacgcgtcggggaccgcggccgtgtccgcgtcgggcgacgcgaccgtcgcggccgcggtcaacgccgcgctcgacctgagcttccccgcgtccgacttcccgggcctcgacgtcatcgccgagcccggccgctacttcgccgaggccgccgcgtcgctctgctgccgcgtcgtcggcgagcggcaccggtcgcgcgcggacgtcggcgcgccgccggagcccgaggcgcagtactggatcaccgacggcgtctacggcgccttcaacgccatcatctacgacggctggctgccccacgccgtcgtcgtcgacgacccgcggcgcgcacacggcgccggcgacgccggcggccgcggcgccggcgcggcgctcacgaccgtcttcggcccgacgtgcgactcgctcgacgtcgtcttctcgcgcgtccgaaacgcgccgccgctgcgccgcgacgactggctcctcttcccctgctgcggcgcctacacgagcgcgggcgcggccgacttcaacggcatccccgcgacggcggccgcgggcgtcgagacgaggtacgtccgctccgactccatgcgctgcacggccgacgacgacgccctcggcctcctctactccgacaagccgcccatggagatcatacgctactgcgactaa

SEQ ID NO: 4 - protein, 565 aa, Aureococcus anophagefferens
MLDVASKFSRSGESPRESPRSSRPRSGSLSTVQADAWRTRDERLRCIAASWTARVEAEVAAVAARGGGGAPRIARGAWPGDWPSRAARPAAAAASRAAAAAAPPAPSPRGPPEARAVPNGRACGLRDYCASVVAAAPRDYAGPFYVVDVGAAERLYDAWAAALPRVRPHYAVKCFPDAGLCRALAAKGCGFDCASEAECRLVFACGATPRDVVFANPCKRPSDVNFLAASGVPWTTFDCCDELAKLAGLLPGATRAVLRLRCDDPTSRLPFGPKYGALEDEVPGLLAAARAAGVAVAGVSFHVGSGARSPAAFAAAIAAARRAFDANAAAGGAPFDVLDIGGGFCGGFDASGTAAVSASGDATVAAAVNAALDLSFPASDFPGLDVIAEPGRYFAEAAASLCCRVVGERHRSRADVGAPPEPEAQYWITDGVYGAFNAIIYDGWLPHAVVVDDPRRAHGAGDAGGRGAGAALTTVFGPTCDSLDVVFSRVRNAPPLRRDDWLLFPCCGAYTSAGAADFNGIPATAAAGVETRYVRSDSMRCTADDDALGLLYSDKPPMEIIRYCD

SEQ ID NO: 5 - DNA, 1407 bp, Aquilegia formosa
aaaaaaaaaaaaggaaaaaaaaaagaaagaaaagggtttctcttcgcctcttctcttcatgggatccatagcaacaagttctaagagccttgaggccatattgaaagctcctggtgtgaagaacaaggaagtgattcggctttcaaatgggaaatcaactgattttattcagtctttcatctcaccgaatcaagaggtaagagaccctttctatgtattggacttgggtatggttagtagtctaatggatcaatggaacagtagcatacccagtattcggcctttttacgctgttaaatgtaatcatgagcccaccttacttgctgccttagcagcacttggggtgggatttgattgcgctagtcaggccgaaatggaggctgttttggcactaggggtgtctgcagaccaaatagtttttgccaatccatgcaaggctgagactcatattaagtttgcagctagtgtaggagtcaatctgactacttatgattcaccatatgaaattgagaaaatgaaaaaatggcaccctaaatgtgcccttttgttgcgtataaaggctggagatgatggaaatgctagatgccctttaggacctaagtatggtgcattgcctgaagaggtcacacaacttcttcaggctgcccacgctgctggacttcctgtagttggagtgtcatttcatgtgggcagcgcaaccacgtactcactagcatatcgcagtgccatagcagctgcaaaggaagttttcaacactgcgttgcaacttggtatgccaaggatgaggactttaaacattggcggtgggttctttgcaggaccccatttcgaagaggctgctgtcacaatcaaagatgctctgcaattgtactttgggaatgaaactgatttagaagtagtctctgaaccgggtcggttctttgccgaaacagcattcacattggcaacatgcattattggaaagcgtgtgcgtggcgagctaagggaatactggattaatgatgggctatatggttctatgaattgtatgctgtatgatcatgcaactgtgactgcaacaccactagcctgcacatcggatcctaccaacccgaaatgcaatggggtaaaaacatatccatcgacagtgttcggacccacttgtgatgctcttgatacaattctcactgattaccagctacctgatcttcaggtaaacgattggcttgtgttcccaaatatgggtgcttatactgcttgtgctggatccaagtttaatgggtttgatacctcagctatacctacttacctggcttgttcggatccatgcattggtcaagagaacaattgataggttggctatcatattttgttttgtttttatttattattgcagttttatctttcgaaactttttaataggaaatt

SEQ ID NO: 6 - protein, 423 aa, Aquilegia formosa
MGSIATSSKSLEAILKAPGVKNKEVIRLSNGKSTDFIQSFISPNQEVRDPFYVLDLGMVSSLMDQWNSSIPSIRPFYAVKCNHEPTLLAALAALGVGFDCASQAEMEAVLALGVSADQIVFANPCKAETHIKFAASVGVNLTTYDSPYEIEKMKKWHPKCALLLRIKAGDDGNARCPLGPKYGALPEEVTQLLQAAHAAGLPVVGVSFHVGSATTYSLAYRSAIAAAKEVFNTALQLGMPRMRTLNIGGGFFAGPHFEEAAVTIKDALQLYFGNETDLEVVSEPGRFFAETAFTLATCIIGKRVRGELREYWINDGLYGSMNCMLYDHATVTATPLACTSDPTNPKCNGVKTYPSTVFGPTCDALDTILTDYQLPDLQVNDWLVFPNMGAYTACAGSKFNGFDTSAIPTYLACSDPCIGQENN

SEQ ID NO: 7 - DNA, 1430 bp, Capsicum annuum
ttgaattcttattttctctgtttccctttgagtcctccgaatggccggccaaacagttattgtttccgggttaaacccggcggccattcttcagtcaacaatcggcggagctcctccttctaccgccgcagctgcggcggagaacggtgacaccaccagaaaagttgttcctctatcaaaagatgcccttcaggatttcatggtttccatcataacccagaagttacaaggtaaaaagaagccgttttatgtgttagatttgggggaagttgtttccctgatggatcaatggaacgttgcgttgccgaatgttcatccgttttatgctgtgaagtgtaatcctgaaccttcattcctttctatgttggctgctatgggttcgaattttgattgtgctagccgtgctgaaattgagtacgttttgtctcttggtatctcgccggagaggattgtattcgctaacccatgtaagccggaatccgatatcattttcgccgaaaaagttggagtcaatctcacaacttacgattcagaggacgaggtttacaagatcaaaaagcatcacccaaaatgcgagcttttgctccgtatcaaaccgatgaacgatggtaatgctagatgtccaatgggtccaaaatacggcgctttgcctgaagaaatcgagccgcttctccgtatagctcaagcttcccggctcactgtctccggcgtctccttccatatcggcagcggcgacgctgattccaacgcttatttaggcgccatagccgcagccaagcaagttttcgaaacggcagccaaattcggcatgtcgaaaatgaatgttctagacatcggcggcgggtttacctccggccaccagttcaccaccgcagcaaccgccgtgaaatcagctttacaacaacacttctctaacgaaccggagctcaccatcatagctgaaccgggtcggtttttcgcagaaacggcgttcacattggcaacaaccatcatcggaaaaagagtacgtggagatttacgtgaatactggatcaacgacgggttatacgggtcaatgaactgtgtactttacgatcatgcaacggtaacggcgacgccgttggcatgcatgtcgaatcgggtcaacctaaactgcagcgggtcgaaaatgtttccgtcgactatattcgggcccacgtgtgatgcacttgataccgtgttaagggattaccagttaccggaactgcaggttaatgactggttaatttttcctaatatgggtgcttatactaaagctgctggatcaaattttaatggatttaatacttctgccattgttactcaccttgcttatgcttatccaagttgataggatttaattagcaaggggttgtaattttatttttcttatgggtttccaattttgtgtttgtaaaaaaaaaaaaaaaaaa

SEQ ID NO: 8 - protein, 435 aa, Capsicum annuum
MAGQTVIVSGLNPAAILQSTIGGAPPSTAAAAAENGDTTRKVVPLSKDALQDFMVSIITQKLQGKKKPFYVLDLGEVVSLMDQWNVALPNVHPFYAVKCNPEPSFLSMLAAMGSNFDCASRAEIEYVLSLGISPERIVFANPCKPESDIIFAEKVGVNLTTYDSEDEVYKIKKHHPKCELLLRIKPMNDGNARCPMGPKYGALPEEIEPLLRIAQASRLTVSGVSFHIGSGDADSNAYLGAIAAAKQVFETAAKFGMSKMNVLDIGGGFTSGHQFTTAATAVKSALQQHFSNEPELTIIAEPGRFFAETAFTLATTIIGKRVRGDLREYWINDGLYGSMNCVLYDHATVTATPLACMSNRVNLNCSGSKMFPSTIFGPTCDALDTVLRDYQLPELQVNDWLIFPNMGAYTKAAGSNFNGFNTSAIVTHLAYAYPS

SEQ ID NO: 9 - DNA, 2126 bp, Chlamydomonas reinhardtii
gtatcctccttattgacacccaaacgctacaaagtcactgaatttcacactgaaagctctccagaaagcgcaaggacttcagtttcaatctaactttcccctttcgttgctcccagccacatacgataggggcttagggtcgtattagctcatcacggacatcgccatgactggcgctaaggatgtcgtcacgctggttccgggcgcgacgcatgctggtgcaggagaggcccctttcgttagaactagcttccaaaacgatatgcgcacgagctttggccgctcctccgccaccgacggccccatgaaggtggatgcggcggtgccgcctgcgcttgcagccgcggtgcagccaattgatcgcggccccgcagctgccgccagctcgctgggccccgccgcctcgcaggagctgtcccgcgccatgctgtccagctggcagtaccgcgtgtccggcaaggcggcggtggcggagctgctgcaggagtgcgccgccgagcacattgcctgcggcgggcctcgcggcgtggaggaggtggcggtgcgccacatccggcgccacgacattgactcggattccatctacgtcgtagacctggcatcgcccttccgcctgttcaaggcctggcgcgccgccatgccgcgtgtgctgccctactacgctgtcaagtgctaccccgagcccgctatcctcaagctgctcatggcgctgggcgccggcttcgactgcgccagcaagggcgagctggacatgatgctcaagctgggggtgtcgcccggccgcatcatcttcgcgcacccctgcaagcgcggcgccgacttccgctacgcgcgcgagcacggcatcacttacaccacctttgacagcagctccgagctgcacaagattgcggagatggacccggagttcaagtgcgtgctgcgcatccgcgcggacgaccccggggcgcgtgtgccgctgggcctcaagtacggcgctgaggtggaggaggcggcggggctgctggcggaggccaagcagctggggctggaggtggtgggcgtgtcgttccacgtgggcagcgccgccaagaacctggccaccttcacaaacgccatcgccaacgcgcgcaaggtgtttgacgacgccgccggcatgggcttcaagatggagctgctggacattggcggcggcttcaccggccacttcgacgagtgcggcaacgtcatgtttggcgagatcgccaacaccatcaacgccgcactcgccacctacttcccgccgggcggcgatctgggcgacgtgcgcgtcatcgccgagccgggccgctacttcgccgagaccagcagcaccctcatgacggtggtgatcgggcagcgcgaccggccgcagaaggacggctccacgcacaaagactactggctcacggacggactgtacggcagcttcaactgcatcgtgtacgacggccagaacccggagtggcgcatcgtgcggtcgcccatcctgcccgaccccgccgacgccaagaccacctacgtgtccacgttgtggggccccacctgcgactccgccgacgtggtgtacaaggacgtggcgctgccggagctgcgcaacggcgactggctgctgtggcccaacgccggcgcctacacggtggcgggcgcatgcgacttcaacggcatcgagttcaccacacccatgaaggtgtatgtgtggagcgacatcgcggtggacgtcgaggtgccggaggcggacagcaaggccgagcaggccgcggagggggcccagtagtaggtgcgcggcgcgtgagcgagtacttgcttttgtatgtgtgggtgcgagggggtgaacaaacagaggtattatttgctatcgctattcaggcgggcgccaagtatttgcatcacaggttccgccctgcgttagacccgaccaggatggtggccgtgcacgttccgagcggtgcctgtgctccttactccttagagcgccatgccgccgtggtgcgaaatgaaggaagcacgcgcgagtatacatatgcggccatggtccgcccagccctgcgtgcgtgctaacggcacggccgtggtcagggaaggtctcggtcttctgtttcatgctttggtgatggacttcgtcggat

SEQ ID NO: 10 - protein, 535 aa, Chlamydomonas reinhardtii
MTGAKDVVTLVPGATHAGAGEAPFVRTSFQNDMRTSFGRSSATDGPMKVDAAVPPALAAAVQPIDRGPAAAASSLGPAASQELSRAMLSSWQYRVSGKAAVAELLQECAAEHIACGGPRGVEEVAVRHIRRHDIDSDSIYVVDLASPFRLFKAWRAAMPRVLPYYAVKCYPEPAILKLLMALGAGFDCASKGELDMMLKLGVSPGRIIFAHPCKRGADFRYAREHGITYTTFDSSSELHKIAEMDPEFKCVLRIRADDPGARVPLGLKYGAEVEEAAGLLAEAKQLGLEVVGVSFHVGSAAKNLATFTNAIANARKVFDDAAGMGFKMELLDIGGGFTGHFDECGNVMFGEIANTINAALATYFPPGGDLGDVRVIAEPGRYFAETSSTLMTVVIGQRDRPQKDGSTHKDYWLTDGLYGSFNCIVYDGQNPEWRIVRSPILPDPADAKTTYVSTLWGPTCDSADVVYKDVALPELRNGDWLLWPNAGAYTVAGACDFNGIEFTTPMKVYVWSDIAVDVEVPEADSKAEQAAEGAQ

SEQ ID NO: 11 - DNA, 2385 bp, Chlamydomonas reinhardtii
gcctgcctgaccttgcagccacctcggcttcggtactctcgctttacttcccagctcgagctatcgctctcgcctagcgttcacgctggcgccccgcaatctcgcaaccgctcttttagcgcgcagctctactatcctgtgcagcctaggctctcaggctatcatcccaaggtctactccagtcgttcggtccaaccgcgtcatcatgacaacttccgaggttctgagtcccccgcccccgagccaggtggctagcctggctcagccgcagttcaacgtggaggcgcttcaggccttctcgatgcccctggtggccgacgttgtcaacactgaaaatggcgacgtcgcttcgttcgcccgcagctcctggcacaaggagtcgggcaaggcgggggcgttcggcctgccgaccatgctggatatgaaggctgaggctctggagcaggtgcagctggacacctggtcggcgcagcctgtggaccgtggtccggcagcagcggctcctgaccccaagctgctgcgctcctggcagtaccaggctactggcaagcttgcaaccgctcaggtcctggtggacgtcaaggctgagcacatcaaggctggtggccccatgggcatgaagcaggaggccattaagcacatcctgcgccacaagccggacgacaccttctatgtggttgacctggctaacgtgcagcgcatgttcaaggcctggcgcgccgctatgccccgcgtggtccccttctacgcggtcaagtgcaacccggagccgggtatcctgaagctgctgaacgcgctgggtgctggcttcgactgcgctagcaagggcgagctggacatgatgctgcgcatgggcgtctcgcccaaccgcattatctttgctcacccctgcaagcgcgcctcggacatccgctacgcgcgcgagcacaacgtgcagtacaccacgttcgacaccgtgtcggagctgcacaagatcgcgcagatgaaccccgacttcaagtgcgtgctgcgcatccgcgccgacgacccggacgcccgcgtgcctctgggcctgaagtacggcgctgaggtgtcggaggccgacgtgctgctgcgcacggcgaaggagctgggcctgcaggtggtgggcgtcagcttccacgttggcagcgcttgccagaacctgtccaccttctcgggcgccattgagaacgcgcgcaaggtgttcgacgaggccggcgccctgggcttcaacatggagctgctggatatcggcggtggcttcaccggccacttcgacgagatgggcaacgtgatgttcggcgagatcgcgaacaccatcaacgccgctctggccaccaacttcccgccggagatgggcgtgcgcgtcatcgccgagcccggccgctacttcgctgagaccagcagcacgctgctgacccccgtctacggccagcgcgaccgcgtggctgccgacggctccgtgaagaaggactactggctcaccgacggcctgtacggctccttcaactgcattctgtacgacggccagaaccctggctacaaggtcgtgcgctcgccgctgatggccgactcgaccgacagccgcaccttcctgtcgaccctgtggggtcccacctgcgacagcgctgactgcgtctacaaggacgtgaccctgcccgtgctgcgcaacggtgactggctgatgtggaacaacgccggcgcctacaccgtggccggtgcctgcgacttcaacggcatcgagttcaccactccgggcaagctgtacgtgtggtccgacagcgcggtggacgcggccgaggagggcgctgacgagcaggtcatgaacgcgtgaacgcaacgtgacagcacttcgcgattgctctcgtgatatttgcgcgcgggatgacccgctctgtctgcatttctgtttattggatggtttgttgtccgcccttgaatgagggccacgatgggcacgggggcgtggtgtcagatgtggtccggccacagcttgggcgtgtgaaagtctcaggttgggttttgttcatagtcgccgggcacgcctgaccggccccgctgctaaaattgccacaggactagcaaactgcattatgaagtttttgggacggaatttgtcactatacttgtatttctggccccgcgagatgcacgggtgtcagtcgaggaggggcagaccgcctccgccggagaaagatgtacagggtacgcagggtgtatgcaggttagacatgcagatggaccggtcgattttggatgaggaggattgcagcacggactggatgcgattggacctggaacgtgtaacgaaagaacgatgatgcattggtcccgtccagtggggacgtggatgctgtctagtcaggattttgaccatcaggatta

SEQ ID NO: 12 - protein, 542 aa, Chlamydomonas reinhardtii
MTTSEVLSPPPPSQVASLAQPQFNVEALQAFSMPLVADVVNTENGDVASFARSSWHKESGKAGAFGLPTMLDMKAEALEQVQLDTWSAQPVDRGPAAAAPDPKLLRSWQYQATGKLATAQVLVDVKAEHIKAGGPMGMKQEAIKHILRHKPDDTFYVVDLANVQRMFKAWRAAMPRVVPFYAVKCNPEPGILKLLNALGAGFDCASKGELDMMLRMGVSPNRIIFAHPCKRASDIRYAREHNVQYTTFDTVSELHKIAQMNPDFKCVLRIRADDPDARVPLGLKYGAEVSEADVLLRTAKELGLQVVGVSFHVGSACQNLSTFSGAIENARKVFDEAGALGFNMELLDIGGGFTGHFDEMGNVMFGEIANTINAALATNFPPEMGVRVIAEPGRYFAETSSTLLTPVYGQRDRVAADGSVKKDYWLTDGLYGSFNCILYDGQNPGYKVVRSPLMADSTDSRTFLSTLWGPTCDSADCVYKDVTLPVLRNGDWLMWNNAGAYTVAGACDFNGIEFTTPGKLYVWSDSAVDAAEEGADEQVMNA

SEQ ID NO: 13 - DNA, 1577 bp, Datura stramonium
aacactcaatattcatatatacatatatatttgaatccctaatttctttgttttcctttgattcctcctctctttggatggccggccagacagtcatcgtttccgggttgaacccggcggccatccttcagtccacaatcggcggagctactcctgcaccggcggcggagaacgaccacaccagaaaagttgttcccctctcaagagatgcccttcaggatttcatggtttcaatcatcacccagaaattacaagatgaaaagcagcccttttatgtgctggatttgggagaagttgtctcccttatggatcaatggaacgccggtttaccaaatatccgtccattttatgctgttaagtgtaacccagaaccttcatttctgtccatgttgtctgctatgggttccaattttgattgtgctagccgtgctgaaattgagtatgttttgtcactcggtatctcaccggaccgtatcgttttcgccaacccatgtaagccggaatccgacataattttcgccgcaaaagttggggttaatctcacgaccttcgattccgaggacgaggtttacaagatccgtaagcatcacccgaaatgcgagctgttgctccgaatcaaacccatggacgacggcaatgcaagatgccctatgggacctaaatacggggcactgcctgaagaagtcgagcccctgctccggaccgctcaagccgccaggctaaccgtctctggcgtttccttccacatcggcagcggagacgccgattccaaagcttatttaggagccatagctgcggcgaagggagttttcgaaacagcggctcggttcggtatgtccaaaatgacggtgttagacatcggcggtggatttacctccggccaccaattcaccaccgcctccgccgctgtcagatcagccctggagcaacacttccatgacgaacaagagctaacaatcatcgccgaaccgggtcggttctttgcagagacggcgttcactttagccacaaccattatcggaaaaagagtgaggggagaattaagagaatactggatcaacgacggcttgtacggatcgatgaactgtgtactttacgaccacgcgacggtgaacgcgacgccgttagcgtgcatgtcgaatcgtagtaacctcaactgcggcgggtcgaaaacgtttccgtcgactgtattcgggcccacctgtgatgcacttgatactgtgttaagggattaccagttaccggagctacaggttaatgactggctgatttttcctaatatgggtgcttacacaaaggctgctgggtccaacttcaatggattcaacacatccgccattgttactcaccttgcttatgcttatcctagctgataaaatcaccaccaattagaatctaattagcagcgtggttgtaattttttccttttttgggggtttttttctaatttgtttccttttttttgtaatttatttttccagtcagctgtagtagtcctcctgtgtctcataagaaaagcaaggatttgctaattggatttcgctcttaattagaagtcatttaattaaaaaaaaaaa

SEQ ID NO: 14 - protein, 431 aa, Datura stramonium
MAGQTVIVSGLNPAAILQSTIGGATPAPAAENDHTRKVVPLSRDALQDFMVSIITQKLQDEKQPFYVLDLGEVVSLMDQWNAGLPNIRPFYAVKCNPEPSFLSMLSAMGSNFDCASRAEIEYVLSLGISPDRIVFANPCKPESDIIFAAKVGVNLTTFDSEDEVYKIRKHHPKCELLLRIKPMDDGNARCPMGPKYGALPEEVEPLLRTAQAARLTVSGVSFHIGSGDADSKAYLGAIAAAKGVFETAARFGMSKMTVLDIGGGFTSGHQFTTASAAVRSALEQHFHDEQELTIIAEPGRFFAETAFTLATTIIGKRVRGELREYWINDGLYGSMNCVLYDHATVNATPLACMSNRSNLNCGGSKTFPSTVFGPTCDALDTVLRDYQLPELQVNDWLIFPNMGAYTKAAGSNFNGFNTSAIVTHLAYAYPS

SEQ ID NO: 15 - DNA, 1628 bp, Glycine max
gctggagctccccgcggtggcggccgctctagaactagtggatcccccgggctgcaggcaaaaatgccttcactagttgctgaagcattccaagccaatggcgcagaacccttgaacctgaagcccattttctgtgcctcaggcatcaagggcaagcgagtgactgcgttgtcagcagaaaaaaatggcctcactgatttcattcaaagaatcattgctgacaaaccagacatcgacacaccattcagcgtcctcgatttgggggtcgtcatgggcctgatggaccaatgggcctgcaagctccccacggtccagcccttctacgccgtcaagtgcaacccaaacctctccctcatcggtgcgctcgctgcgctcggctccagcttcgactgcgccagcaaagccgagatcgaatccgttctctccctcggagtctcacccgacagaatcatctatgcaaacccatgcaaatccgagtcacacatcagatacgccgcctccgtaggcgtcaacgtcacaacctacgactccatagacgaggtcgagaaaatccgaaaatgccaccccacgtgcgagttgctcctccgcattaaacccccgcaagacagcggagcgcgaaccagcttgggcctcaaatacggcgcgcttcccgaggaagtcgatgagcttctccaagctgctcacgaggcggggctcaaggtgaccggcgtgtccttccacattggtagcggcggagccgacacgcgagcctaccacggagccatatccgccgctaaaaacgtcttcgaatcggcttctcggctcggcttgcccagaatgggcgtcctcgacatcggcggcggcttcacctctgggccgtcgttcgaagccgcggctttgaaaataaacgccgcgattgaaggcagcttcgggaaggaggaggggctggtggtgattggcgagccgggtcgttatttcgcggaaacggctttcacgttggcgacgagagttattggaaagcgcgtcaggggggacgtgagggagtattggattgacgatgggatttacggaactcttaataacatcgtgtttgattacgctaccgtcacgtgcatgccactcgcgtgcacctcgaaaccggagaatcctacatgctgcagggatttgaatttgaagacttaccctagcaccgtgtttggacccacatgcgattctattgatacggttctgagggattaccagctcccggaactgcaagtgaacgattggcttgtgttcccgaacatgggtgcctatacgacgtcgtccgggactaacttcaatgggtttagctcctcagccaagtccatattccttgcatgttcgagcccggaacacaccatgttctaatcaatacaaatcccaaactatcccttgctcaatgtacttacttattttattatcaacttgtctctcttttggtttcggaaactcaataatggcggaatggctgctcgtggacgccgcgtggtttctctcttgattgtattactactatctttttcttttcatttatattttctaatttggagacacctacgtaccttttgatattcgaaataaaatttcgtttattgttgatactaaaaaaaaaaaaaaaaaaaaaaaaa

SEQ ID NO: 16 - protein, 434 aa, Glycine max
MPSLVAEAFQANGAEPLNLKPIFCASGIKGKRVTALSAEKNGLTDFIQRIIADKPDIDTPFSVLDLGVVMGLMDQWACKLPTVQPFYAVKCNPNLSLIGALAALGSSFDCASKAEIESVLSLGVSPDRIIYANPCKSESHIRYAASVGVNVTTYDSIDEVEKIRKCHPTCELLLRIKPPQDSGARTSLGLKYGALPEEVDELLQAAHEAGLKVTGVSFHIGSGGADTRAYHGAISAAKNVFESASRLGLPRMGVLDIGGGFTSGPSFEAAALKINAAIEGSFGKEEGLVVIGEPGRYFAETAFTLATRVIGKRVRGDVREYWIDDGIYGTLNNIVFDYATVTCMPLACTSKPENPTCCRDLNLKTYPSTVFGPTCDSIDTVLRDYQLPELQVNDWLVFPNMGAYTTSSGTNFNGFSSSAKSIFLACSSPEHTMF

SEQ ID NO: 17 - DNA, 1588 bp, Glycine max
ctctcgtctaccaattaaaaatgccttcactagttgcggaggcattcgaagccaagggcgcagaacccttgagcctgaagcccattttcagtgcctcaggcgtcaagggcaagcgagtaactgcactatcagcagaagcaaatgccctcactgatttcattcaagcaatcatagctgacaaaccagacatcgactctccattcagcgtcctcgatttgggcgtcgtaatgggcctcatggacaaatgggcctgcaagctccccacggtccagcccttctacgccgtcaagtgcaacccaaacctctccctcatcggcgcgctcgctgcactcggctccagcttcgactgcgccagcaaagccgagatcgaatctgtcttgtccctcggagtctcaccggacagaatcatctacgcaaacccatgcaaatccgagtcccacatcagatacgccgcctccgtaggtgtcaacgtcacaacctacgactccctcgacgaggtcgagaaaatccgcaattgccaccccacgtgcgagttgctcctccgcattaaacccccgcaagacagtggagcgcgtaccagcttgggcctcaaatacggcgcgcttcccgaggaggtccatgagcttctccaagctgctcacgaggcggggctcaaggtaacaggcgtgtccttccacattggtagcggcggagccgacacgcgagcctacgacggagccatatccgccgctaaaaacgtattcgaaatggcttctgggctcggcttgcccagaatgcgcgttctggacatcggaggcggcttcacctctgggccgccgtttgaagccgcggcattgaaaataaacgctgcgattcaggccagcttcgggaacgaggaagggctcgtggttattggcgaaccgggtcgttacttcgctgaaacggctttcacgttggcgacgagaattattgggaagcgcgtgaggggggacgtgagggagtactggattgacgatgggatttacggaacgcttaataacatagtgtttgattacgctaccgtcacgtgcatgccactggcgtgcacctcgaaaccggagaatcctagatgcagcagggaattgaatttgaagacttaccctagcaccgtgtttggacccacgtgcgattctattgatacggttctgagggattacaagctgccgggactgcaagtgaacgattggctagtgttcccgaacatgggtgcatatacgacgtcgtcggggactaacttcaatgggtttagctcctcagccaagtccacgttccttgcatattccagcccggaacacagcatgttctaatcaatgcaagtcccaaaccgatataccttggtatttgctgaatgtactttagttattattattaacttatctctcttttggtttgggatactcaataatggcggaatgggtgctcgtgtacgccgcgtggtttctctcttctgattgtactttctttttctttccatttatgctagtgttttctaatttcgagacacctaccttttgatattcgaaataaaattttgtttattgttggtaaaaaaaaaaaaaaaaaaaaaaaa

SEQ ID NO: 18 - protein, 434 aa, Glycine max
MPSLVAEAFEAKGAEPLSLKPIFSASGVKGKRVTALSAEANALTDFIQAIIADKPDIDSPFSVLDLGVVMGLMDKWACKLPTVQPFYAVKCNPNLSLIGALAALGSSFDCASKAEIESVLSLGVSPDRIIYANPCKSESHIRYAASVGVNVTTYDSLDEVEKIRNCHPTCELLLRIKPPQDSGARTSLGLKYGALPEEVHELLQAAHEAGLKVTGVSFHIGSGGADTRAYDGAISAAKNVFEMASGLGLPRMRVLDIGGGFTSGPPFEAAALKINAAIQASFGNEEGLVVIGEPGRYFAETAFTLATRIIGKRVRGDVREYWIDDGIYGTLNNIVFDYATVTCMPLACTSKPENPRCSRELNLKTYPSTVFGPTCDSIDTVLRDYKLPGLQVNDWLVFPNMGAYTTSSGTNFNGFSSSAKSTFLAYSSPEHSMF

SEQ ID NO: 19 - DNA, 1586 bp, Lotus japonicus
gaaatactccttttgttttctttcacctagctatacctacctatctagtactaagagaagccaaacaatgccttcactagtctccggggaaatccaagccaaagatgctgccgagtctctaagcctgaacccaatttttagtgcctcaggagtgaagggaaagcgagttaccgcattgaccaaagaatgtgacatgtctcatctcattgaatccatcattgctgacaaaccagacatggattcttcattcagcgtgcttgatcttggggtagtcatggaactcatggacaagtgggtcaccaagttccccaccgttcagcctttctacgccgtcaagtgcaaccccgacatctccctcatcggcgccctcgccgcactaggctccagcttcgactgcgccagcaaagctgagatccaaatcgtcttgtccctcggcatctcaccggaccgcattgtctacgccaacccgtgcaaatccgagtccgacatcaagtatgccgcaaccgtcggcgtcaacctcgcaacctatgactccgtgtacgaggttgacaaggtacaaaagtggcacccgaaatgcgagttgctcctccgcataaagtatgacagtgaaggagcattggcatcgctcggcgtcaaatacggcgcgctccctgaggaagtcccggagcttctcaaagccgctgaggcggcaggcgtaaatgtgactggcgtgtcgttccacattggcagcgggggagccgacccgctagccctctccggagctatcgaagccgccaagagcgtctttgagatggcaagccatttcggaatgtccaggatgtctatcctcgacatcgggggtgggttcacctgcggaccagagctggacgttgcggccacgaaggtgaaggctgcaattctagcccacttcggagaccaccagggtctcgtggttatcgcagagcctggtcgttacttcacggaaacggcgttcacgttagttagcagggttattgggaaacgagttaggggagagttgagggagtattggatcaatgatggagtttatggatctatcagtaacataatatatgaccacgctaccattaggtgcgcaccactaaggcaaaagaatctcacgtgcgtggatgcgaagacctaccctaccaccgtgttcggacccacatgcgattgcattgacattgttctcaaggattaccagctaccagaactgcaggtgaatgattggcttgtgttcccgaatatgggagcttatactatttcttcagggactaacttcaatgggtttacttcagcagtcaaacatgtctatctcgcatgttctgaacaatcctaaactaatgatgttgtgaaaccaaaataataatggcactggtggtcttgtaactttagtgatctctcttctatgtatgttttgtattgtattcaattgaattcaactacacattgaattcaatggagtaagctttggtgtcttgatgtatattttccgtttgccttgttacaaacgggaaatcaaacacctatatgataagaaataaaattttgttttagtgttttaaaaaaaaaaaaaaaaaaaaaaaaaa

SEQ ID NO: 20 - protein, 422 aa, Lotus japonicus
MPSLVSGEIQAKDAAESLSLNPIFSASGVKGKRVTALTKECDMSHLIESIIADKPDMDSSFSVLDLGVVMELMDKWVTKFPTVQPFYAVKCNPDISLIGALAALGSSFDCASKAEIQIVLSLGISPDRIVYANPCKSESDIKYAATVGVNLATYDSVYEVDKVQKWHPKCELLLRIKYDSEGALASLGVKYGALPEEVPELLKAAEAAGVNVTGVSFHIGSGGADPLALSGAIEAAKSVFEMASHFGMSRMSILDIGGGFTCGPELDVAATKVKAAILAHFGDHQGLVVIAEPGRYFTETAFTLVSRVIGKRVRGELREYWINDGVYGSISNIIYDHATIRCAPLRQKNLTCVDAKTYPTTVFGPTCDCIDIVLKDYQLPELQVNDWLVFPNMGAYTISSGTNFNGFTSAVKHVYLACSEQS

SEQ ID NO: 21 - DNA, 1302 bp, Nicotiana benthamiana
atggccggccaaacaatcatcgtttccgggttgaacccggcggccattcttcagtccacaattggcggcggagctttccctacagcggcggcggcggcggaaaatggcaccagaaaagtcatccctctctcaagagatgccctacaagatttcatgttatcaatcataacccaaaaattacaagatgagaaacaacctttttacgtgttagatttgggtgaggttgtttctcttatggaccaatggaaatctgctctcccaaatatccgtccattttacgctgttaagtgtaaccctgaaccgtcgttcctttcaattttatctgctatgggctcaaattttgattgtgctagccgtgctgaaattgagtatgttttatctcttggaatttcacctgaccgtattgttttcgcaaatccatgcaaaccggaatccgatattatttttgcagcaaaagttggggtgaatcttacaacctatgattcagaagacgaggtttacaagatccgaaagcatcacccgaaatccgaactcttgctccgaatcaagcccatgctcgacggcaacgcgagatgcccaatgggcccgaaatacggcgcgcttccagaagaagtcgacccgctgctccgggcagctcaaaccgcccgtctcaccgtctccggtgtctcattccacatcggtagcggagatgccgattcaaacgcttatctcggcgccatagccgcggctaaggaagtgtttgaaacagctgctaaactcgggatgtcgaaaatgactgttctagacgtcggcggcgggtttacatccggccaccagttcacaaccgccgccgtcgccgttaaatcagctttaaaacaacacttcgatgacgaaccgggattggcaatcatagctgaaccgggtcggttttttgcagagacggcgtttactttggcaacgacgattatagggaaaagagtgaggggtgaattgagggagtattggattaacgacgggctgtacggttcgatgaactgtgtactatacgaccatgcgacggtgaatgcaacgccgttagctgttctgtcgaatcgtagtaacgtcacctgcggcaggtcgaaaacgtttccgacgactgtgtttgggcccacttgtgatgctcttgatactgttttaagggattaccagttaccggagctgcaggttaatgattggctggtttttcctaatatgggtgcttatactaaagctgctgggtccaattttaatggatttaatacttccgccattgttactcacctcgcttattcttatccaagctga

SEQ ID NO: 22 - protein, 433 aa, Nicotiana benthamiana
MAGQTIIVSGLNPAAILQSTIGGGAFPTAAAAAENGTRKVIPLSRDALQDFMLSIITQKLQDEKQPFYVLDLGEVVSLMDQWKSALPNIRPFYAVKCNPEPSFLSILSAMGSNFDCASRAEIEYVLSLGISPDRIVFANPCKPESDIIFAAKVGVNLTTYDSEDEVYKIRKHHPKSELLLRIKPMLDGNARCPMGPKYGALPEEVDPLLRAAQTARLTVSGVSFHIGSGDADSNAYLGAIAAAKEVFETAAKLGMSKMTVLDVGGGFTSGHQFTTAAVAVKSALKQHFDDEPGLAIIAEPGRFFAETAFTLATTIIGKRVRGELREYWINDGLYGSMNCVLYDHATVNATPLAVLSNRSNVTCGRSKTFPTTVFGPTCDALDTVLRDYQLPELQVNDWLVFPNMGAYTKAAGSNFNGFNTSAIVTHLAYSYPS

SEQ ID NO: 23 - DNA, 1299 bp, Nicotiana glutinosa
atggccggccaaacaataatcgtttccgggttgaacccggcggccattcttcagtccacaataggcggcggagcttcacctacagcggcggcggcggaaaacggcaccagaaaagtcattcctctctcaagagatgctctccaagatttcatgttatcaatcataacccaaaaattacaagatgagaaacaacctttttacgtgttagatttgggtgaagttgtttctcttatggaccaatggaaatcttctctcccaaatatccgtccattttacgctgttaaatgtaaccctgaaccgtcgttcctttcaattttatctgctatgggctcaaattttgattgtgctagccgagctgaaattgagtacgttttagcccttggcatttcgcctgaccgtattgtttttgcaaatccatgcaagccggaatccgatattatttttgcagcaaaagttggggtgaatttaacaacgtacgattcagaagacgaggtttacaagatccgaaagcatcacccgaagtccgaactcttgccccgaatcaagcccatgttcgacggcaacgcgaggtgtccaatgggtccaaaatacggcgcgcttccagaagaagtcgaaccgttgctccgggcagctcaggccgctcggctcaccgtctccggtgtttccttccacatcggtagcggagatgccgattcaaacgcttatctcggcgccatagccgcggctaaggaagtgtttgaaacagctgctaaactcggtatgtcgaaaatgactgttctagacgtcggcggcgggtttacatccggccaccagttcacaaccgccgccgtcgctgttaaatcagctttaaaacaacacttcgacgacgaaccggagttgacaatcatagctgaaccgggccggttttttgcggagacggcgtttactttagcgacgacggttatagggaaaagagtgaggggagaattgagggagtattggatcaacgacgggttgtacggttcgatgaactgcgtactttacgaccatgcgacggtgaatgcaacgccgttagctgttttgtcgaatcgtactaacgttacctgcggcgggtcgaaaacgtttccgacgactgtgtttgggcccacctgtgatgctcttgatactgttttacgggattaccagttaccggagctgcaggttaatgattggctagtttttcctaatatgggtgcttatactaaagctgctgggtccaattttaatggatttaatacgtccaccattgttactcacctcgcttatacttatccaagctga

SEQ ID NO: 24 - protein, 432 aa, Nicotiana glutinosa
MAGQTIIVSGLNPAAILQSTIGGGASPTAAAAENGTRKVIPLSRDALQDFMLSIITQKLQDEKQPFYVLDLGEVVSLMDQWKSSLPNIRPFYAVKCNPEPSFLSILSAMGSNFDCASRAEIEYVLALGISPDRIVFANPCKPESDIIFAAKVGVNLTTYDSEDEVYKIRKHHPKSELLPRIKPMFDGNARCPMGPKYGALPEEVEPLLRAAQAARLTVSGVSFHIGSGDADSNAYLGAIAAAKEVFETAAKLGMSKMTVLDVGGGFTSGHQFTTAAVAVKSALKQHFDDEPELTIIAEPGRFFAETAFTLATTVIGKRVRGELREYWINDGLYGSMNCVLYDHATVNATPLAVLSNRTNVTCGGSKTFPTTVFGPTCDALDTVLRDYQLPELQVNDWLVFPNMGAYTKAAGSNFNGFNTSTIVTHLAYTYPS

SEQ ID NO: 25 - DNA, 1879 bp, Ornithorhynchus anatinus
aaaacttatagtgcatcggctgcaccaaggacacaaacataacctgcatttctcaggactttctttcctgaagaaataccctaggtgtctagctggaaagagctttactgtttcatctcctagttttccgtattgttgcactttagaagaataacaaggaatcatgaataacttcagcaatgatgagtttgactttacattccttgatgaaggatttactgccaaggatatcctggaccaaaaaatcaatgaagtttcttcctctgatgataaagatgccttctacgttgctgacctcggggatgtcctaaaaaaacacttgcgatggtacaaagccctccctcgagtcactcctttttatgctgtcaaatgtaatgacagcaaagctattgtgaagacgcttgctgctttaggggctggattcgattgtgccagcaagaccgaaattcagttggtgcagagcatcggtgtgtctccagagagaataatttatgcaaatccatgtaaacaagtgtcccagattaagtatgctgccaacagtggagtgcagatgatgacttttgatagtgaagttgagttaatgaaagttaacagagctcatccaaaggcaaagttggtcctgcggattgccactgacgactccaaagcagtctgtcgcctaagtgtcaaattcggtgccacactcaaaacgagcaggcttctcctggaacgggctaaagaactcaacattgatgttattggagtcagctttcatgttgggagtggttgtaccgatccagacacctttgtccaggcagtgactgatgcccggtgtgtcttcgacatgggagctgagcttggttttgatatgtatctgctggatattggaggaggtttccctggctctgaagatgtgaagctcaagtttgaagagatcacaagtgtcatcaatccagcattggagaagtactttccttctgattcaggagtgagaatcattgctgaaccgggcagatactatgttgcatcagctttcacacttgctgttaatatcattgccaaaaaagttgtattaaaagaacagacaggttctgatgatgaagatgatgttaatgacaaaactataatgtattatgtgaatgatggagtatatggatcatttaattgcatcttgtacgatcacgcgcacgttaaaccgattctacaaaagagacccaaaccagatgagagctactattcctgcagcatttggggtccaacgtgtgatgggctcgatcgtatcgttgagcgctgcgatatgccagaattgcaagttggagattggatgctttttgaaaatatgggtgcctacactgttgctgctgcttctactttcaatggattccagaggccaactatatattatgtgatgtcaggtccagcatggcaacgaatgcaacaaatcaacgagcgaggttttccagcagaagtagaggagccagaaaacaacactttgcccttgtcttgtgcttgggaaagcggcatggaacatcacccggcaacttgtgcttcggctagtattaacgtatagatacttgtgtgtagtctcttttaccagcgagtgtagcttgaatttagggcattttcggggaccattaacttaattcctgctagtttttttaaaaatgtgttcaagagtagggttggcataaatgcgacgaaatggatgactagaagatggggtcacatttatctgtgttcctatggaaactatttgaatatttgttttatatggatttttattcacttttcaactatgctactaaagattgtccctccactgtttgaacaagcgtttgtagcttgtgtaacagcagaatgggctgagcttagtgttgtgacctgttttaaaataaaatat

SEQ ID NO: 26 - protein, 461 aa, Ornithorhynchus anatinus
MNNFSNDEFDFTFLDEGFTAKDILDQKINEVSSSDDKDAFYVADLGDVLKKHLRWYKALPRVTPFYAVKCNDSKAIVKTLAALGAGFDCASKTEIQLVQSIGVSPERIIYANPCKQVSQIKYAANSGVQMMTFDSEVELMKVNRAHPKAKLVLRIATDDSKAVCRLSVKFGATLKTSRLLLERAKELNIDVIGVSFHVGSGCTDPDTFVQAVTDARCVFDMGAELGFDMYLLDIGGGFPGSEDVKLKFEEITSVINPALEKYFPSDSGVRIIAEPGRYYVASAFTLAVNIIAKKVVLKEQTGSDDEDDVNDKTIMYYVNDGVYGSFNCILYDHAHVKPILQKRPKPDESYYSCSIWGPTCDGLDRIVERCDMPELQVGDWMLFENMGAYTVAAASTFNGFQRPTIYYVMSGPAWQRMQQINERGFPAEVEEPENNTLPLSCAWESGMEHHPATCASASINV

SEQ ID NO: 27 - DNA, 1233 bp, Oryza sativa
atggctggaggaagacccttggagtcggtgctcgtggcccccggggtgaagggaaagaaggtactcgcattcaagcgcgacgggctcaagaaaaacgaggcagtgacgggcctcatccacgacatcgtcgccagctccagcgccaggagcgcgttccacgtcctggacctcgccaaggtggtcgacctctacgcgggatggcgccgcgcgctccccggcgtgaggcccttctacgccgtcaagtgcaacccggacacggcgctgctcggcgcgctcgccgcgctcggcgccggcttcgactgcgccagccgcgccgagatcgaggccgtcctcgcgctcggcgtcccgcccgccgccatcgtctacgctaacccgtgcaagcccggcgcgcacgtcgcgttcgccgccgaggccggcgtcaacgtcaccacgtacgattccgaggaggaggtggccaaggtgaagcgctgccaccccagttgcgagctgctgctccgcatcaaggcgccggactgcggcggcgtcaaggtcgacctcggcctcaagtacggcgccaacccggacgaggtgctgccgctgctgcgcgccgcgcgccgcgcgggcctcggcgtggccggcgtgtcgttccacgtcggcagcggcgcgtcccgcgcggccgtctaccgcggcgccatcgaggccgcgcgcgcggcgttcgacgcggccgcggggctcgggatgccgccgatgcgcgtcctgaacatcggcggcgggttcgtcgccggcgccgcgttcggcgacgcggcggcggtaatcaaccgcgcgctcgggcgctactttggcgacctcctccccaccgtcgagttgatcggcgagcccggccggtacttcgccgagaccgccttcacgctcgccgcgcgcgtcatcgggaagcgcaggcgcggcgacgtgcgcgagtactggatcgacgacggcgtctacggctcgctcaactgcatcctcctggacagctacgtgccgcgcccgaggccgctcgccggcgcgcgccccggcgaggagacgcacgcctcgacggtgttcgggccgacgtgcgactccatcgacacggtggtgaccgggtaccagctgccggagatgagcgtcgacgactggcttgtgttcgacgacatgggcgcctacaccactgcggccggctccagcttcaacggctttgccacgtcagccataaacacctacctggcatactccagctag

SEQ ID NO: 28 - protein, 410 aa, Oryza sativa
MAGGRPLESVLVAPGVKGKKVLAFKRDGLKKNEAVTGLIHDIVASSSARSAFHVLDLAKVVDLYAGWRRALPGVRPFYAVKCNPDTALLGALAALGAGFDCASRAEIEAVLALGVPPAAIVYANPCKPGAHVAFAAEAGVNVTTYDSEEEVAKVKRCHPSCELLLRIKAPDCGGVKVDLGLKYGANPDEVLPLLRAARRAGLGVAGVSFHVGSGASRAAVYRGAIEAARAAFDAAAGLGMPPMRVLNIGGGFVAGAAFGDAAAVINRALGRYFGDLLPTVELIGEPGRYFAETAFTLAARVIGKRRRGDVREYWIDDGVYGSLNCILLDSYVPRPRPLAGARPGEETHASTVFGPTCDSIDTVVTGYQLPEMSVDDWLVFDDMGAYTTAAGSSFNGFATSAINTYLAYSS

SEQ ID NO: 29 - DNA, 1245 bp, Oryza sativa
atggttggaggaagccccatgcaggccgtgctcatggcccccggcgtcaaggacaagaaggtgctcgccttcaagcgcggcaagggcaaggacgccgacgccggcgtcacggcgctcatccgcgacatcgtcgccggcggcgcccggagcgcgttccacgtcttcgacctcgccaaggtcgtcgacctccaccgcgggtggcgccgcgcgctccccgacgtgcgcccctgctacgccgtcaagtgcaaccccgacggcgccatgctcgccgcgctcgccgcgctcggcgccggcttcgactgcgccagccgcgccgagatcgaggcagtgctcgcgctcggcgtccgccccgccaccatcgtctacgccaacccgtgcaagcccgaggcgcacctcgagtacgccgccgaggtcggcgtcaacctcaccacctacgactccgaggaggaggtggccaaggtccggcgatgccacccgcgctgcgagctgctgctccgcatcaaggcgcccgactccggcgacgccaaggtcgacctggggctcaagtacggcgccaacccggacgaggtgctaccgctcctccgcgccgcgcagcgcgagggcgtcgccgtcgccggcgtctccttccacgtcgggagcggcgcgtcccgcgccgacgtctaccgcggcgccatcgaggcggcgcgcgaggcgttcgacgccgcggcggcgctcggcatgccgccgatgcgcgtcctcgacatcggcggcggcttcatggccggccggaccttcgacgaggcggcggcggtcatcaaccgcgcgctggagcgccacttcggcgacctcccctgcgtcgaggtgatcggcgagcccgggcggtacttcgccgagacggcgttcaccctcgccgcgcgcgtcatcgggaagcgcacccgcggcgagctccgggagtactggatcgacgacggcctctacggctccctcaactgcatcctcatggaccactacgtgccgcgcccgaggccgctcgccgccgccgccgccggcgaggacacgacggcggcgacgacgcacgcctcgacggtgttcggcccgacgtgcgactccctcgacacggtggtcaccggctaccagctgccggagatgagcgtcggcgactggctcgtgttcgacgacatgggcgcctacaccaccgcggctggctccaacttcaacggcttcgccacgtcagcgataaagatccacctggcatactccagctag

SEQ ID NO: 30 - protein, 414 aa, Oryza sativa
MVGGSPMQAVLMAPGVKDKKVLAFKRGKGKDADAGVTALIRDIVAGGARSAFHVFDLAKVVDLHRGWRRALPDVRPCYAVKCNPDGAMLAALAALGAGFDCASRAEIEAVLALGVRPATIVYANPCKPEAHLEYAAEVGVNLTTYDSEEEVAKVRRCHPRCELLLRIKAPDSGDAKVDLGLKYGANPDEVLPLLRAAQREGVAVAGVSFHVGSGASRADVYRGAIEAAREAFDAAAALGMPPMRVLDIGGGFMAGRTFDEAAAVINRALERHFGDLPCVEVIGEPGRYFAETAFTLAARVIGKRTRGELREYWIDDGLYGSLNCILMDHYVPRPRPLAAAAAGEDTTAATTHASTVFGPTCDSLDTVVTGYQLPEMSVGDWLVFDDMGAYTTAAGSNFNGFATSAIKIHLAYSS

SEQ ID NO: 31 - DNA, 1170 bp, Phaeodactylum tricornutum
atgcctttggaagactctttttacgttgtcgacattggtgtcctcgtttctcaggtctaccaatggagacgagtctttccacgtgtggagcctttttacgctgtcaagtgcaaccccgaccctctaattgtcaagaccctagcgacgctaggctgcaactttgattgtgcgagtcgcaacgaaatacgtctggtgatggaagccacaaaagacatgcccaccaagcccgacatcatctacgccaatccctgcaaatcgcgactcgggctcctcgaagccgtttgcaagggcgttaaaatggttaccttcgacaacgaaatggaagttcaaaagtgtgcctccatttcgaaaaacattcaactcgtcctccgcatcatcaccgatgaccggggatcccagtgtcgtctttcttccaagtttggtgcgcctcgtcacaaatggcgcctattgctggccgctgcacaaaagcacggcctccaagtggtcggggtgtcctttcatgtcggctccggctgccgcgacgcttcccgctacgaagcagccctgaaagacgccagggaaatcttcgaccttgctggagagtacggcatgaatatgcaagtcttggacattggcggtggtttcccgggagaaacacacagggatggccactttatgtatttcactgaaattgccgaacaagtggctccgctcattgacgaaatgtttcctccctccgttcgcatcattggtgaacctggacgctactttgtcgctgcctgtgctactttgtgctgctccgtaattgcggctcgtacgaatgaaatgaattcttccttcgaacccgaagcgattgatgacaaggaggccgccgaaaacctgccccctctccaggacgactactcctactacatcaacgatggtgtgtacggggccttcaacaacattatgttcgaccatgccacggtgcgtcctcgcattcttggacccggagaaaagattgtagccacggaagaggatgtgtttggacctacatgcgactcgattgacgtgattgcccgatcggttctacttcccaaactcaaggtgggcgactacatgtattttcaaaacatgggagcttacactatggcagctgccagctcgttcaacggttttactcctagcgagaagttctatgtttgctccgtc

SEQ ID NO: 32 - protein, 390 aa, Phaeodactylum tricornutum
MPLEDSFYVVDIGVLVSQVYQWRRVFPRVEPFYAVKCNPDPLIVKTLATLGCNFDCASRNEIRLVMEATKDMPTKPDIIYANPCKSRLGLLEAVCKGVKMVTFDNEMEVQKCASISKNIQLVLRIITDDRGSQCRLSSKFGAPRHKWRLLLAAAQKHGLQVVGVSFHVGSGCRDASRYEAALKDAREIFDLAGEYGMNMQVLDIGGGFPGETHRDGHFMYFTEIAEQVAPLIDEMFPPSVRIIGEPGRYFVAACATLCCSVIAARTNEMNSSFEPEAIDDKEAAENLPPLQDDYSYYINDGVYGAFNNIMFDHATVRPRILGPGEKIVATEEDVFGPTCDSIDVIARSVLLPKLKVGDYMYFQNMGAYTMAAASSFNGFTPSEKFYVCSV

SEQ ID NO: 33 - DNA, 1581 bp, Solanum lycopersicum
cactctatatattatggttaatattatttgaggttactccgtctcaaagggaacagagaaattcatatatttttcggtattccttcttctctttgaatggccggccaaacagtcattgtttccggtttgaatccggcggccattcttcagtccacaatcggtggagctccggtggcagcggcggcggagaacggccatacgagaaaagttgttcctctgtcaaaagatgcccttcaggatttcatggtttcaatcataacacagaaattacaggacgataaacaacccttttatgttctagatttgggtgaagttgtttcccttatggaacaatggaactctgctttaccaaatatccgtccgttttatgctgttaaatgtaaccctgaaccttcatttctctccatgttgtctgctatgggttccaattttgattgtgctagccgtgctgaaattgagtatgttttgtctcatggtatctcgccggaccggattgttttcgctaacccttgtaagccggaatccgatattatcttcgccgagaaaattggggttaatctcactacttacgattccgaggatgaagtttacaagatccgtaaacatcacccaaaatgcgagcttttgcttcgaatcaaacccatgaccgacggcaacgcgagatgcccaatgggtccaaaatacggcgcattaccggaggaaatcgagccgctcctccgtacagctcaagccgctagactcaccgtctccggcgtgtccttccatatcggcagcggagacgccgattccaacgcttatctaggagccatagccgcagcgaaacaggttttcgaaacagcagctcaactcggaatgccaaaaatgacggtactcgacatcggcggcggatttacctccggccaccaattcaccaccgctgctcccgccgttaaatcagctctggaaacccacttccacgacttccctgagctaaccatcatcgctgaaccaggtcgtttcttcgccgaaacagcgttcactttagcaacaaccatcatcggcaaaagagtcagaggtgaattaaaagaatactggatcaacgatgggttatacggatcgatgaactgtgtactttacgaccatgcgacggtgacggcgacgccattagcgtgcatgtcgaatcgtaataacctcaactgcggcgggtcgaaaacgtttccgtcgactgtattcgggcccacctgtgatgcacttgataccgtgttaagggattaccagttaccggagctacaggttaatgactggctgatttttcctaatatgggtgcttatacaaaagctgctggatcaaatttcaatggatttaacacatccgccattgttactcaccttgcttatgcttatccaaactaatgattaattaggctttaattagcatggtcattgtaattttttttcttctaattttgttcttgtttggtaatttattttccaatcagcttgtagtttcttttttctttttggtctcataagataagcaaggattagtcaattggatttgcatgtacttatattttatgtctaaataatccaatttcatgt

SEQ ID NO: 34 - protein, 431 aa, Solanum lycopersicum
MAGQTVIVSGLNPAAILQSTIGGAPVAAAAENGHTRKVVPLSKDALQDFMVSIITQKLQDDKQPFYVLDLGEVVSLMEQWNSALPNIRPFYAVKCNPEPSFLSMLSAMGSNFDCASRAEIEYVLSHGISPDRIVFANPCKPESDIIFAEKIGVNLTTYDSEDEVYKIRKHHPKCELLLRIKPMTDGNARCPMGPKYGALPEEIEPLLRTAQAARLTVSGVSFHIGSGDADSNAYLGAIAAAKQVFETAAQLGMPKMTVLDIGGGFTSGHQFTTAAPAVKSALETHFHDFPELTIIAEPGRFFAETAFTLATTIIGKRVRGELKEYWINDGLYGSMNCVLYDHATVTATPLACMSNRNNLNCGGSKTFPSTVFGPTCDALDTVLRDYQLPELQVNDWLIFPNMGAYTKAAGSNFNGFNTSAIVTHLAYAYPN

SEQ ID NO: 35 - DNA, 1790 bp, Schizosaccharomyces pombe
aaaacagtgacaagtgggtaagaaaaagaatctggaaggataaacgctctttttgcgcgaccaccaaaagtatataaaagtgcaaatttccgtctacgtctcctatttaagacaatctctcgaataaggactttttgatcaacagcagatttcaaatcattgattgatttgaaatagtaaaattattgtaaagcgagcagttgacaaacaaaacgtttgtttagcttgtatccgaagaaaaattattcaacgattcaatttagtgatctcggaatttctagaagagaaaaagcttacttacacgatgcctgctattatggaaaagaatatgctcgtcagcgagtcgttgcgtacgacggaattacttggccatgttaaaccaattgactcagtggtgacatggtcttcgcctggatcgtctcgccaggcgattggtgaggcgtttaaaaacacgattgaggaaattgagcgtgcagctgtccgtggtgaacccgctgactctgatgcattttttgttgctgatttgaacggagtatatcgccaacttcttcgttggcatgctaaattacctcgtgttcaaccattttatgcagtcaaatgtaatcctgatcctaaggtacttgcattgcttaataaatttggaactggttttgactgtgcttctaagggtgaactcgaacaaattcttggcttaggtgtatcccctgatcgaattgtatacgccaatccttgtaaagccataacttatgtgcgctatgctgcttctaaaggcattaatctgatgacttttgataatgccgatgagctgtacaaggtgaaacaacatcatcccaactcacgtcttcttcttcgtatttctaccgatgattccaatagtctttgccgtctcagtctaaagtttggtgcttctctcgatgatactggtaagctgctagacatcgcaaagtccctggagttaaatgtcgtcggtgttagctttcacgttgggtcaggaagctatgatccctcagcatttttggatgctatccaacgatctcgtcaggtatttgatcagggacttgaaaggggatttaattttgacttgttggacattggtggtggtttcatgaatgacagctttgatggcgtagcagaccttattcgctctgccttggatacttattttgatccctccatccgtgttatttctgagcccggtcgctttttcgtctcttcttcgtttactttggctgtcaatgtaattgccaaacggaagcttgatgatgaagagaaggtgatgtattacgtaaacgatggtgtttatggtagccttaattgtattttgtttgaccatcaacatccagttgctcgagttctaaagtgtggaagtcggtttgtgtacaatgatttggttggcaccggccaacatcgttgttttatttggggtcctacttgcgattcattggatgtgatagctaacgatgcccatcttccttatgagctcaacgtcggtgactggatatattttgaagatgcgggagcttacactgttgcagctgctagctgttttaacggttttaaaaccagtcgcattgtgtaccttgatacggatatccttgattaaattattttaaagatcggtgtaagtttattctacattgcataatctcttttctcttactacatatactaattccatactggttggatttaaatcaaaattatttctgtgctattgttcgcctttcaagctttattgttacgtttaaataaaattacaatcaaaaagttatatgctttatgaatctaaa

SEQ ID NO: 36 - protein, 432 aa, Schizosaccharomyces pombe
MPAIMEKNMLVSESLRTTELLGHVKPIDSVVTWSSPGSSRQAIGEAFKNTIEEIERAAVRGEPADSDAFFVADLNGVYRQLLRWHAKLPRVQPFYAVKCNPDPKVLALLNKFGTGFDCASKGELEQILGLGVSPDRIVYANPCKAITYVRYAASKGINLMTFDNADELYKVKQHHPNSRLLLRISTDDSNSLCRLSLKFGASLDDTGKLLDIAKSLELNVVGVSFHVGSGSYDPSAFLDAIQRSRQVFDQGLERGFNFDLLDIGGGFMNDSFDGVADLIRSALDTYFDPSIRVISEPGRFFVSSSFTLAVNVIAKRKLDDEEKVMYYVNDGVYGSLNCILFDHQHPVARVLKCGSRFVYNDLVGTGQHRCFIWGPTCDSLDVIANDAHLPYELNVGDWIYFEDAGAYTVAAASCFNGFKTSRIVYLDTDILD

SEQ ID NO: 37 - DNA, 1580 bp, Solanum tuberosum
gagaaaaacacacaaactatatttgggtccctattttctttgtttccctttgattccttcttctctttggatggccggccaaacagtcattgtttccggtttgaatccggcggccattcttcagtccacaatcggcggagttccggtggcagcagcggcggagaacggccataccagaaaagttgttcctctgtcaaaagatgcccttcaggatttcatggtttcaatcataacccagaaattacaggacgataaacaacccttttatgttctagatttgggtgaagttgtttcccttatggaacaatggaactctgctttaccaaatattcgtccgttttatgctgtgaaatgtaaccctgaaccttcatttctctccatgttgtctgctatgggttccaattttgattgtgctagccgtgctgaaattgagtatgttttgtctcttggtatctcgccggaccggattgttttcgctaacccttgtaagccggaatccgatatcattttcgccgagaaaattggggttaatctcacaacttacgattcagaggatgaagtttacaagatccgtaaacatcacccgaaatgcgagcttttgcttcgaatcaaacccatgaacgacggcaacgccagatgcccaatgggtccaaaatacggcgcattaccggaagaaatcgagccgctcctccgtacagctcaagccgctagactcaccgtctccggcgtttccttccatatcggcagcggagacgccgattccaacgcttatctaggagccatagccgcagcgaaacatgttttcgaaacagcaactcaactcggaatgccaaaaatgacggtactcgacatcggcggcggatttacctccggccaccaattcacctccgctgctcccgccgtgaaatcagctctggaaacccacttccagaactccccggagctaacaatcatcgctgaaccgggtcgtttcttcgcagaaacggcgttcactttagcaacaaccatcatcggcaaaagagtcagaggtgaattaaaagaatactggatcaacgatgggttatacggatcgatgaactgtgtactttacgaccatgcgacggtgacggcgacgccattagcgtgcatgtcgaatcgtaacaacctcaactgcggcgggtcgaaaacgtttccgtcgactgtattcgggcccacctgtgatgcacttgataccgtgttgagggattaccagttaccggagctgcaggttaatgactggctggtttttcctaatatgggtgcttatacaaaagctgctggatcaaatttcaatggatttaatacatccgccattgttactcaccttgcttatgcttatccaagctaatgattaattaggcttaaattagcatggtggttgtaattttatttttttcttctaattttgtcgttgtttggtaatttatttgccaatcagcttgtagtttcttttttgtctcataagaaaagcaaggatttgccaattggatttgcttgtagttatattttatgtctaaataatccaatttcatctattgaattttatgttcgagaaagggggc

SEQ ID NO: 38 - protein, 431 aa, Solanum tuberosum
MAGQTVIVSGLNPAAILQSTIGGVPVAAAAENGHTRKVVPLSKDALQDFMVSIITQKLQDDKQPFYVLDLGEVVSLMEQWNSALPNIRPFYAVKCNPEPSFLSMLSAMGSNFDCASRAEIEYVLSLGISPDRIVFANPCKPESDIIFAEKIGVNLTTYDSEDEVYKIRKHHPKCELLLRIKPMNDGNARCPMGPKYGALPEEIEPLLRTAQAARLTVSGVSFHIGSGDADSNAYLGAIAAAKHVFETATQLGMPKMTVLDIGGGFTSGHQFTSAAPAVKSALETHFQNSPELTIIAEPGRFFAETAFTLATTIIGKRVRGELKEYWINDGLYGSMNCVLYDHATVTATPLACMSNRNNLNCGGSKTFPSTVFGPTCDALDTVLRDYQLPELQVNDWLVFPNMGAYTKAAGSNFNGFNTSAIVTHLAYAYPS

SEQ ID NO: 39 - DNA, 1745 bp, Theobroma cacao
accagggatttgtactttgattcattgttcacactttggatttcctgcaattactgttgccttttgggatagttacttttggtgcttgattcttcaaggatgaaaaaggctattcaattatagacacctttttctccttttcctccaccaccatctcatgatgtggtgccaccctgaccctgtctctttatatatagccacccagagtacgattatagtgcttctactttcggaattctcatcttgctgttaaaagccttatactttttagttctttctgagtctatttaggttgccatgggatccagccccaggaccctccaagccattgtgggtgcgcctggggtgagaggaaagaaggtcgccgctctgtcgaaagatggtttgactgctttcattcagtcaatcgtttccaccaaacaagaaatgaaagagcccttttacgtgctggatttgggtgttgtcatggctctgtttgacaagtgggcccgtaaccttcccatggctcaacctttctacgccgttaagtgtaaccccaacccagctttgcttggggcattagctaccctgggctcaggcttcgactgtgcaagtaaggccgagattgaatccgttttgtctcttggtgtttcacctggtagaatcatctttgctaatccatgcaaagcagagtcccacatcaagtatgctgcaacagtcggtgttaacctgacaactttcgactccaaagaggaacttgagaagattaagaagtggcaccctaaatgtgccttattgatccgagtcaaggccccggatgatggcggcgcaagatgccctttaggtcccaagtacggtgcacttccggaggaagtcacccctcttctccaagctgctcaaactgcacggctcaccgttacaggagtctcgttccacattggcagtggagccatgcagtttcgagcctatcgagaagccatagcagcagctaaaactgtgtttgaaacggctgctagacttggcatgcccaaaatgcatgtgctaaacatcggtggagggttcacagccggcccacaattcgctgaagcagcgtcaacggtgaaagccgctctccaagcgtatttcccaaacgagccaagcttaacagtaattgcggagcctggtcgtttttttgcggagtcagctttcaccctagccaccaacattataggaaagcgcgttaggggtgatttaagagagtattggatcaacgatgggatctacggctcaatgaactgtattctctatgaccatgcggtcgtcacctgcatgcctctcgcaagagcatccagtcccaggtgcaaaggagccaggacctacgattccaccgtgtttggacccacgtgcgatgcgcttgacacggtcttgaaagtttatccgctgccagaactgcaagtgaacgactggctggtgtttcccaacatgggggcttacacggcggctgctgggtccaatttcaatgggttcaacacgtcagccatcctgacgtaccttgcttattccaacccaaattgagtgaggcccttggcgaactggactgcatggtttcgtgtttgacatgccatcgatgctctcatcatttggtttgcgattgttgtgaattattttatatcgttatattagtttctgcttgaaatttgtatcttctctattggaatatgattctgcaactaaaaatttagacacctaatgctaataagacagtatcttctattccaaaaaaaaaa

SEQ ID NO: 40 - protein, 411 aa, Theobroma cacao
MGSSPRTLQAIVGAPGVRGKKVAALSKDGLTAFIQSIVSTKQEMKEPFYVLDLGVVMALFDKWARNLPMAQPFYAVKCNPNPALLGALATLGSGFDCASKAEIESVLSLGVSPGRIIFANPCKAESHIKYAATVGVNLTTFDSKEELEKIKKWHPKCALLIRVKAPDDGGARCPLGPKYGALPEEVTPLLQAAQTARLTVTGVSFHIGSGAMQFRAYREAIAAAKTVFETAARLGMPKMHVLNIGGGFTAGPQFAEAASTVKAALQAYFPNEPSLTVIAEPGRFFAESAFTLATNIIGKRVRGDLREYWINDGIYGSMNCILYDHAVVTCMPLARASSPRCKGARTYDSTVFGPTCDALDTVLKVYPLPELQVNDWLVFPNMGAYTAAAGSNFNGFNTSAILTYLAYSNPN

SEQ ID NO: 41 - DNA, 1167 bp, Thermotoga maritima
atgatggaatactggattagaagagcccttgaagtagtgaaaacgccttttcttcttttcgatctgtcggtcgtggaaaagaaatatctggagatgaaagctgctctcaaaaaagcggatatttactacgctgtgaaggcaaactcccacccgcgtattatatcccttcttgccaggttggggagtaatttcgatgtggcttccaagggggagatagaaaagctcctcgcacttggtgtggatgggaagagaatgagttttggtaacaccataaaaagagaggaagacatcgcgttcgcgtacaaaaacggtataaggctctttgcagtggatagtgagatggaagtggaaaaagtcgctataaatgctcctggaagcttcgtttttgtgagagtggaaacggatggtgcagacgcagactggcccctttccagaaagtttggaaccaatccagagcatgctcttcagcttctctcctatgcttcgaagatgaaactgatccccgcgggattgagttttcacgtgggatctcagaatttgaatcctgaaagctggaaaaaggcgatagagatcgcggggagagtgttcaaaaaagccatgagatccggtttgaatcttttcctcttgaacgttggtggaggctttcctgttcagcacacaaagccaattccaagtatggaagaaataggaaaggcaatcgaagaggcgatagacgaaaacctctggtttgtccacaatttgaaagtgatagccgagcccggaaggtacatggtcggagaagcaggctggcttgtcacaaaagtgcttttgaagagcgaaagatcaggtgaaaaatgggtttacatcgacgcgggagtatttcacgggctcgcagaaactatccaaaacttcgagtacgaaatcagagtcctcggaaaagaaagagaagagctcgaagagtaccatctggcgggtcccacttgtgacagcgtggatgtgatatacgacagaatctttcttccaaagagcatcactctgaacgaccttgtgtgcttcataaacgcgggggcttacacggttgagtacaacacccgtttcaacggaatagaacctccaaagatggttttcatcgaagaactcacggagatctcaatagaggagaaaatcaaaacacgagtgctggattga

SEQ ID NO: 42 - protein, 388 aa, Thermotoga maritima
MMEYWIRRALEVVKTPFLLFDLSVVEKKYLEMKAALKKADIYYAVKANSHPRIISLLARLGSNFDVASKGEIEKLLALGVDGKRMSFGNTIKREEDIAFAYKNGIRLFAVDSEMEVEKVAINAPGSFVFVRVETDGADADWPLSRKFGTNPEHALQLLSYASKMKLIPAGLSFHVGSQNLNPESWKKAIEIAGRVFKKAMRSGLNLFLLNVGGGFPVQHTKPIPSMEEIGKAIEEAIDENLWFVHNLKVIAEPGRYMVGEAGWLVTKVLLKSERSGEKWVYIDAGVFHGLAETIQNFEYEIRVLGKEREELEEYHLAGPTCDSVDVIYDRIFLPKSITLNDLVCFINAGAYTVEYNTRFNGIEPPKMVFIEELTEISIEEKIKTRVLD

SEQ ID NO: 43 - DNA, 2268 bp, Volvox carteri
aaattgttatcatatttacgcattttgacgctgccccgctttcggcatccacaacttccccccgagcaaggaccgcttggcctgtatcggcccaagctggcgccccgtaattttgccacttctttattggctcaaagctcgacccttctgagacttctaagttctcagccttcattctctccttcggcaccaggttccttttccaacaggcctgtggcctcatgcgacggtatcccattgttacttcattgcctccggtgcgctctcccaggctaaatcgcgtcatcatgacaagttctgaggtcctgagtccccctccgccggctgcggtggcaagccttgctgcgccgcaactgcacagcgtggacctgcagtctctgcagctgcctctggttcccgacgttgtcagcgttgaaactggcgatgtctccgcctttaccaggagtgcttggcgcaacgacacgggcaagacgggcacctatgggcttccaactatgcttgatatgaaggcagaggcattggagatggtgcagttggacaactggagcgttcagcctgtggaccgcggcccggcaactgcggcccctgatccgaagctgctccgttcctggcagtaccaggcgacgggaaagcttgctacagcccaagtcttggtggacttgaaggctgagcacatcaagtcgggtggacccatgggtatgaagcaggaggcaatcaagcacatcgtaaagcacaagccagacgacaccttctatgtggtcgaccttgctaacgtacagcgcatgtttaaggcctggcgcgctgcgatgccccgcgtaatgccttactacgctgtcaagtgcaacccggagccagggatcctgaagttgctggtggcgatgggtgctggctttgactgcgcttccaagggcgagctcgacatgatgctgcgcatgggggtttcgcctagccgtatcattttcgctcacccgtgtaaacgagcgtcagacatccgctacgcccgagaccacggcattcagtacactacattcgacactgtgtcggagctttacaagatttctcaaatgaaccctgacttcaagtgcgtactccgtattcgcgcggacgaccccgatgcccgcgtcccgctgggcttgaagtatggcgctgaggtttcggaggcgccagttctcctgcagaccgccaaggaccttgggctccatgtcgtcggcgttagtttccacgtcggcagtgcatgccaaaacctctcgactttcagtggagctattgagaatgcccgcaaggtgttcgacgaggcccacacgttgggatttcacatggagctcctcgacattggtggcggctttactggccacttcgatgagatggggaacgtaatgttcggtgagattgccaacaccatcaacacagctttggctgcccacttcccgcctgagatgggagtccgtgtcatcgcggagcctggccgctacttcgccgagacgagtagcacattgctgaccccggtgtacggccagcgggaccgcgttgcgcatgatggagctgttaagaaggactactggctgacggatggtctctacggcagctttaactgcattctctacgatgggcagagtcccgcgtacaaggtcgttcgctctcccctgcttccggagccggctgatatccgcaccttcacgtccacgttgtggggccccacctgtgatagcgctgactgcgtgtacaaggacgtgcagttgcccgtacttcgcaacggagattggctgatgtggaataacgccggcgcttacaccgtcgctggtgcgtgcgacttcaatggcatcgagttcactactcccggcaagctctacgtctggtcggatagtgctgtggacgtcgagctggcagaggagaatgtcatggaagcgtgatgggctaaatttatgtacagcttctttttcatgttctgggatgtgaagcataactgtggtttgaccgttttttttgtcgaggctacggtctgattttaatgggtagtgaaactgtgtcaatgacgtttctatataacattgtctttttttccgattgtgaccttttatgtcaccaacttacgattggaattcaacaattcctacgcgtttcgataattgtaggactcggcaggatgcaatgctgtgtttccgctaactatcgtcaaatgaaaacattcatatgtgtcggctaggaaattcctaccggaagggcaccaatctatctgaggtatctaattgtaactaatagaaaggttta

SEQ ID NO: 44 - protein, 562 aa, Volvox carteri
MRRYPIVTSLPPVRSPRLNRVIMTSSEVLSPPPPAAVASLAAPQLHSVDLQSLQLPLVPDVVSVETGDVSAFTRSAWRNDTGKTGTYGLPTMLDMKAEALEMVQLDNWSVQPVDRGPATAAPDPKLLRSWQYQATGKLATAQVLVDLKAEHIKSGGPMGMKQEAIKHIVKHKPDDTFYVVDLANVQRMFKAWRAAMPRVMPYYAVKCNPEPGILKLLVAMGAGFDCASKGELDMMLRMGVSPSRIIFAHPCKRASDIRYARDHGIQYTTFDTVSELYKISQMNPDFKCVLRIRADDPDARVPLGLKYGAEVSEAPVLLQTAKDLGLHVVGVSFHVGSACQNLSTFSGAIENARKVFDEAHTLGFHMELLDIGGGFTGHFDEMGNVMFGEIANTINTALAAHFPPEMGVRVIAEPGRYFAETSSTLLTPVYGQRDRVAHDGAVKKDYWLTDGLYGSFNCILYDGQSPAYKVVRSPLLPEPADIRTFTSTLWGPTCDSADCVYKDVQLPVLRNGDWLMWNNAGAYTVAGACDFNGIEFTTPGKLYVWSDSAVDVELAEENVMEA

SEQ ID NO: 45 - DNA, 1491 bp, Vitis vinifera
atgcatgttctcgacattggaggagggttccaggaaagcccaacgttccacgaaattgctgcagtcataaaggaagccatcaatgattatttcccaagttctgaaacatctgaagatctcaagataatggctgagccagggagattctttgctgaaactgcattcacgctggtgtctaatataattgggaaacgggtgagaggcgagaagagagagtattggattgatgatgggatctacggatcctttaaccttccagcatatgataagtcgtccatgatggtgaaaccgctgcttggaggatcagaccgcttcttgggggatcagagagatggatttacggctctcatccgatcaatttcacagaaacaaaaggatcgtgagccattctacatattggatttgggagctgtagtgaggctcatggacatgtggaaacaagctcttcccaacgtggtgccatactatgctgttaaatgcaattgccaacctccattgatcactgcgcttgcctcactgggcgcaaacttcgactgcgcaagtcgtgctgagattgagacggtgatggcacttggagttggtgcccaacagattgtgtacgccaatccatgtaagggcgagtcccatctaaagtacgcagccagtgtgggggtcaacctcaccaccttcgactccatgcaggagattgataagattataatgtggcataaaaaatgcgacttgctgcttcgaatcaaggctccgaatgatgagaaaggttcatggcgttcgcttggatccaaattcggagcactgcgggaggaggtggtgccacttcttcagcacgccaatgcagcggggctgagggtaattggggtgtcattccacgtggggtctaaagtgaatgacccccaagtgtaccgtggagcaatagcttctgctaggggtgtgttcgacgcagctgcccagctgaagctgcctccaatgcatgttctcgacattggaggggggttccaggaaagcccaacgttccacgaaattgctgcagtcataaaggaagccatcaatgattatttcccaagttctgaaacatctgaagatctcaagataatggctgagccagggagattctttgctgaaactgcattcacgctggtgtctaatataattgggaaacgggtgagaggcgagaagagagagtattggattgatgatgggatctacggatcctttaaccttccagcatatgataagtcgtccatgatggtgaaaccgctgcttggaggatcagagtggatgaataaggctaaattctcttcgactgtgtttggaccaacgtgtgattccatggacatggtggtggctgaatctcaactgccggagctgcatatgaatgatgtgctagtgttctataacatgggggcatacactgcctctgctggaaccagattcaatggctttgacatatcatcaatttccaccttcctgacgtacgtttacaggcaatattaa

SEQ ID NO: 46 - protein, 496 aa, Vitis vinifera
MHVLDIGGGFQESPTFHEIAAVIKEAINDYFPSSETSEDLKIMAEPGRFFAETAFTLVSNIIGKRVRGEKREYWIDDGIYGSFNLPAYDKSSMMVKPLLGGSDRFLGDQRDGFTALIRSISQKQKDREPFYILDLGAVVRLMDMWKQALPNVVPYYAVKCNCQPPLITALASLGANFDCASRAEIETVMALGVGAQQIVYANPCKGESHLKYAASVGVNLTTFDSMQEIDKIIMWHKKCDLLLRIKAPNDEKGSWRSLGSKFGALREEVVPLLQHANAAGLRVIGVSFHVGSKVNDPQVYRGAIASARGVFDAAAQLKLPPMHVLDIGGGFQESPTFHEIAAVIKEAINDYFPSSETSEDLKIMAEPGRFFAETAFTLVSNIIGKRVRGEKREYWIDDGIYGSFNLPAYDKSSMMVKPLLGGSEWMNKAKFSSTVFGPTCDSMDMVVAESQLPELHMNDVLVFYNMGAYTASAGTRFNGFDISSISTFLTYVYRQY

SEQ ID NO: 47 - DNA, 1200 bp, Vibrio vulnificus
atggcacattcacaatctatttttgatattcattcactaacttcaccagtgctaagcgcagaagaaatccacttgatcgaagcgtcggttgagcaatttggtgcgccactcttgctattggactgcgatgtgattcgtcagcagtaccgcgctttgaaaaacgcgttgccaaacgtgacgctgcactacgcattaaaaccgctgccacacccagtggtggtgcgtactttgttagcagaaggggcgagtttcgaccttgcaacaacaggggaagtggagttggtcgcttctgaaggcgtaccggcggatctcactatccacactcacccaatcaagcgtgatgccgatattcgtgatgcactggcttacggttgcaacgtatttgtagtggataacttgaatgaactggaaaaattcaaagcgtatcgcgatgacgtcgagttattggtgcgcttgagcttccgcaattcagaagcgtttgctgacttgtcgaagaagtttggttgttcaccagagcaggcattagtgatcatcgaaacggcaaaagagtggaatattcgcatcaaaggtttgtcgttccatgtgggctcacaaactactaacccaaacaagtatgttgaagcgatccacacttgccgacatgtgatggaacaagtggttgaacgcggtttgccagcgttgagcacgcttgatattggtggtggcttccctgtgaactacacccaacaagtgatgccgattgatcaattctgcgcgccaattaatgaagcgctaagcttgttgccagaaacggtccacgttttggctgaaccgggtcgctttatctgtgcacctgcggtgaccagtgtggcttcagtgatggggcaagccgagcgtgaagggcaaatttggtactacttggatgacggtatttatggctcgttcagtggtttgatgtttgacgatgcgcgttatccgctcaccaccatcaaacaaggtggcgagctgatcccaagcgtactttctggcccaacgtgcgacagcgtggatgtgattgcagaaaacattctgctgccaaaattgaacaatggcgatttggtaattggccgcaccatgggtgcctacaccagtgcaaccgcgaccgattttaacttctttaaacgcgctcaaactattgcgctgaatgaatttgttgcaagcagcgaacgcatgattggctaa

SEQ ID NO: 48 - protein, 399 aa, Vibrio vulnificus
MAHSQSIFDIHSLTSPVLSAEEIHLIEASVEQFGAPLLLLDCDVIRQQYRALKNALPNVTLHYALKPLPHPVVVRTLLAEGASFDLATTGEVELVASEGVPADLTIHTHPIKRDADIRDALAYGCNVFVVDNLNELEKFKAYRDDVELLVRLSFRNSEAFADLSKKFGCSPEQALVIIETAKEWNIRIKGLSFHVGSQTTNPNKYVEAIHTCRHVMEQVVERGLPALSTLDIGGGFPVNYTQQVMPIDQFCAPINEALSLLPETVHVLAEPGRFICAPAVTSVASVMGQAEREGQIWYYLDDGIYGSFSGLMFDDARYPLTTIKQGGELIPSVLSGPTCDSVDVIAENILLPKLNNGDLVIGRTMGAYTSATATDFNFFKRAQTIALNEFVASSERMIG

SEQ ID NO: 49 - DNA, 1383 bp, Xenopus laevi
atgaacagcttcagcaatgacgactttgacttcagcttcctggaggaaggcttctctgccagggatattgtggagcaaaagatcaatgaagtgtccttatctgacgacaaagatgccttttatgttgctgatcttggcgacattgtgaaaaagcatgtgcgttggtttaaagcgctcccccgtgtcactccgttttatgccgtaaaatgcaacgatggcaaagccattgtgaagactctctccattcttggtgccggctttgactgtgccagtaagactgaaatccaactagtacagagtattggagtttcccccgagcggattatctatgcaaacccgtgtaaacaagtttcccagatcaaatacgcagctagctgtggtgtggagaagatgacttttgatagtgaagttgaattgatgaaagtggcaaggaatcacccgaatgcaaagcttgttctacgcatagcaactgatgactcaaaagcagtctgccgcctcagtgtgaaatttggtgccacccttaaaacaagcaggctgcttctggagcgggcaaaggagcttaatgtggatataattggtgtgagtttccatgttggcagtggctgcactgatccacagacttatgtacaagctgtctcagatgcacgatgtgtctttgacatgggggctgagcttggctttaacatgcatctacttgatattggtggtggattccctggttcagaggatgtgaaactgaagtttgaagagatcacatctgtgataaacccagccctggataaatacttcccagcagattctggcgttaaaatcattgcagagcctgggagatactatgttgcctcatctttcaccctggcagttaatatcattgccaagaaagttatggtgaatgagcaaagtggatctgatgatgaagaagatgctgccaatgacaaaactctgatgtactacgtcaatgatggagtgtatggatctttcaactgcatcttgtttgatcatgcacatgtcaagccagttctaacaaagaaacccaaaccagatgagaagttctactcgagcagcatttggggaccaacgtgtgatgggctggatcgtatcgtagaaaggtttgagctgccggagctgcaagttggagactggatgttgtttgaaaacatgggtgcctacactgttgctgcagcctcgacattcaatggatttcagagaccaaccctttattatgttatgtcaagaccacactggcaactgatgcatgatattaaagaacatggcattctccctgaagtaccagatctgagtgcactccatgtatcctgtgctcaggagagcggaatggaacttgcacctgctgtctgtactgctgccagcatcaatgtatag

SEQ ID NO: 50 - protein, 460 aa, Xenopus laevi
MNSFSNDDFDFSFLEEGFSARDIVEQKINEVSLSDDKDAFYVADLGDIVKKHVRWFKALPRVTPFYAVKCNDGKAIVKTLSILGAGFDCASKTEIQLVQSIGVSPERIIYANPCKQVSQIKYAASCGVEKMTFDSEVELMKVARNHPNAKLVLRIATDDSKAVCRLSVKFGATLKTSRLLLERAKELNVDIIGVSFHVGSGCTDPQTYVQAVSDARCVFDMGAELGFNMHLLDIGGGFPGSEDVKLKFEEITSVINPALDKYFPADSGVKIIAEPGRYYVASSFTLAVNIIAKKVMVNEQSGSDDEEDAANDKTLMYYVNDGVYGSFNCILFDHAHVKPVLTKKPKPDEKFYSSSIWGPTCDGLDRIVERFELPELQVGDWMLFENMGAYTVAAASTFNGFQRPTLYYVMSRPHWQLMHDIKEHGILPEVPDLSALHVSCAQESGMELAPAVCTAASINV

SEQ ID NO: 51 - protein, 41 aa, Artificial sequence
  Motif 1
  VARIANT (1)..(1): /replace = "Gly"
  VARIANT (4)..(4): /replace = "Val"
  VARIANT (6)..(6): /replace = "Met"
  VARIANT (7)..(7): /replace = "Ser"
  VARIANT (8)..(8): /replace = "Leu"
  VARIANT (10)..(10): /replace = "Phe"
  VARIANT (17)..(17): /replace = "Ala"
  VARIANT (22)..(22): /replace = "Gln"
  VARIANT (23)..(23): /replace = "Thr"
  VARIANT (25)..(25): /replace = "Lys"
  VARIANT (26)..(26): /replace = "Glu"
  VARIANT (27)..(27): /replace = "Leu"
  VARIANT (28)..(28): /replace = "Arg"
  VARIANT (32)..(32): /replace = "Val"
  VARIANT (38)..(38): /replace = "Ile"
NARCPLGPKYGALPEEVEPLLRAAQAAGLTVSGVSFHVGSG

SEQ ID NO: 52 - protein, 21 aa, Artificial sequence
  Motif 2
  VARIANT (1)..(1): /replace = "Asp"
  VARIANT (2)..(2): /replace = "Gln"
  VARIANT (3)..(3): /replace = "Ala"
  VARIANT (7)..(7): /replace = "Val"
  VARIANT (10)..(10): /replace = "Ala"
  VARIANT (11)..(11): /replace = "Val"
  VARIANT (14)..(14): /replace = "Arg"
  VARIANT (20)..(20): /replace = "Lys" /replace = "Asn"
  VARIANT (21)..(21): /replace = "Ser"
KDPFYVLDLGEVVSLMDQWRA

SEQ ID NO: 53 - protein, 42 aa, Artificial sequence
  Motif 3
  VARIANT (3)..(3): /replace = "Ile"
  VARIANT (4)..(4): /replace = "Tyr"
  VARIANT (10)..(10): /replace = "Arg"
  VARIANT (13)..(13): /replace = "His"
  VARIANT (15)..(15): /replace = "Lys" /replace = "Arg"
  VARIANT (16)..(16): /replace = "Phe"
  VARIANT (19)..(19): /replace = "Ser"
  VARIANT (27)..(27): /replace = "Phe"
  VARIANT (33)..(33): /replace = "Leu"
  VARIANT (34)..(34): /replace = "Glu"
  VARIANT (36)..(36): /replace = "Val"
  VARIANT (37)..(37): /replace = "Ala" /replace = "Lys"
RIVFANPCKPESDIIYAAKVGVNLTTYDSEDEVYKIRAKHHP

SEQ ID NO: 54 - protein, 21 aa, Artificial sequence
  Motif 4
  VARIANT (3)..(3): /replace = "Tyr"
  VARIANT (5)..(5): /replace = "Asp"
  VARIANT (8)..(8): /replace = "Val" /replace = "Ile"
  VARIANT (12)..(12): /replace = "Met" /replace = "Leu"
  VARIANT (15)..(15): /replace = "Val"
  VARIANT (17)..(17): /replace = "Phe"
EYWINDGLYGSFNCILYDHAT

SEQ ID NO: 55 - protein, 11 aa, Artificial sequence
  Motif 5
  VARIANT (8)..(8): /replace = "Ile"
EYVLSLGVSPD

SEQ ID NO: 56 - protein, 44 aa, Artificial sequence
  Motif 6
  VARIANT (3)..(3): /replace = "Glu"
  VARIANT (6)..(6): /replace = "Arg"
  VARIANT (10)..(10): /replace = "Asp"
  VARIANT (11)..(11): /replace = "Ala"
  VARIANT (13)..(13): /replace = "Se"
  VARIANT (14)..(14): /replace = "Gln" /replace = "Arg"
  VARIANT (15)..(15): /replace = "Phe"
  VARIANT (17)..(17): /replace = "Leu"
  VARIANT (18)..(18): /replace = "Ser"
  VARIANT (19)..(19): /replace = "Arg" /replace = "Pro"
  VARIANT (21)..(21): /replace = "Arg"
  VARIANT (24)..(24): /replace = "Asp"
  VARIANT (25)..(25): /replace = "Val"
  VARIANT (31)..(31): /replace = "Ala"
  VARIANT (33)..(33): /replace = "Pro"
  VARIANT (36)..(36): /replace = "Glu"
  VARIANT (37)..(37): /replace = "Glu"
  VARIANT (40)..(40): /replace = "Val"
  VARIANT (41)..(41): /replace = "Lys" /replace = "Val"
  VARIANT (42)..(42): /replace = "Ile"
  VARIANT (43)..(43): /replace = "Asn"
  VARIANT (44)..(44): /replace = "Ala"
AIAAAKEVFETAAKLGMPKMTVLDIGGGFTSGHQFTTAAAAVKS

SEQ ID NO: 57 - protein, 41 aa, Artificial sequence
  Motif 7
  VARIANT (1)..(1): /replace = "Ile"
  VARIANT (3)..(3): /replace = "Ala"
  VARIANT (6)..(6): /replace = "Thr"  /replace = "Val"
  VARIANT (11)..(11): /replace = "Glu"
  VARIANT (12)..(12): /replace = "Asn"
  VARIANT (13)..(13): /replace = "Asp" /replace = "Gly"
  VARIANT (14)..(14): /replace = "His"
  VARIANT (19)..(19): /replace = "Ile"
  VARIANT (23)..(23): /replace = "Lys"
  VARIANT (31)..(31): /replace = "Leu"
  VARIANT (41)..(41): /replace = "Asp"
GGGAPPAAAAAENGTRKVVPLSRDALQDFMVSIITQKLQDE

SEQ ID NO: 58 - protein, 15 aa, Artificial sequence
  Motif 8
  VARIANT (3)..(3): /replace = "Ile"
QTVIVSGLNPAAILQ

SEQ ID NO: 59 - DNA, 50 bp, Artificial sequence
  PRIMER 1
ggggacaagtttgtacaaaaaagcaggcttaaacaatggccggccaaaca

SEQ ID NO: 60 - DNA, 50 bp, Artificial sequence
  PRIMER 2
ggggaccactttgtacaagaaagctgggttacaggtggttcatcagcttg

SEQ ID NO: 61 - DNA, 2194 bp, Oryza sativa
aatccgaaaagtttctgcaccgttttcaccccctaactaacaatatagggaacgtgtgctaaatataaaatgagaccttatatatgtagcgctgataactagaactatgcaagaaaaactcatccacctactttagtggcaatcgggctaaataaaaaagagtcgctacactagtttcgttttccttagtaattaagtgggaaaatgaaatcattattgcttagaatatacgttcacatctctgtcatgaagttaaattattcgaggtagccataattgtcatcaaactcttcttgaataaaaaaatctttctagctgaactcaatgggtaaagagagagattttttttaaaaaaatagaatgaagatattctgaacgtattggcaaagatttaaacatataattatataattttatagtttgtgcattcgtcatatcgcacatcattaaggacatgtcttactccatcccaatttttatttagtaattaaagacaattgacttatttttattatttatcttttttcgattagatgcaaggtacttacgcacacactttgtgctcatgtgcatgtgtgagtgcacctcctcaatacacgttcaactagcaacacatctctaatatcactcgcctatttaatacatttaggtagcaatatctgaattcaagcactccaccatcaccagaccacttttaataatatctaaaatacaaaaaataattttacagaatagcatgaaaagtatgaaacgaactatttaggtttttcacatacaaaaaaaaaaagaattttgctcgtgcgcgagcgccaatctcccatattgggcacacaggcaacaacagagtggctgcccacagaacaacccacaaaaaacgatgatctaacggaggacagcaagtccgcaacaaccttttaacagcaggctttgcggccaggagagaggaggagaggcaaagaaaaccaagcatcctccttctcccatctataaattcctccccccttttcccctctctatataggaggcatccaagccaagaagagggagagcaccaaggacacgcgactagcagaagccgagcgaccgccttctcgatccatatcttccggtcgagttcttggtcgatctcttccctcctccacctcctcctcacagggtatgtgcctcccttcggttgttcttggatttattgttctaggttgtgtagtacgggcgttgatgttaggaaaggggatctgtatctgtgatgattcctgttcttggatttgggatagaggggttcttgatgttgcatgttatcggttcggtttgattagtagtatggttttcaatcgtctggagagctctatggaaatgaaatggtttagggatcggaatcttgcgattttgtgagtaccttttgtttgaggtaaaatcagagcaccggtgattttgcttggtgtaataaagtacggttgtttggtcctcgattctggtagtgatgcttctcgatttgacgaagctatcctttgtttattccctattgaacaaaaataatccaactttgaagacggtcccgttgatgagattgaatgattgattcttaagcctgtccaaaatttcgcagctggcttgtttagatacagtagtccccatcacgaaattcatggaaacagttataatcctcaggaacaggggattccctgttcttccgatttgctttagtcccagaattttttttcccaaatatcttaaaaagtcactttctggttcagttcaatgaattgattgctacaaataatgcttttatagcgttatcctagctgtagttcagttaataggtaatacccctatagtttagtcaggagaagaacttatccgatttctgatctccatttttaattatatgaaatgaactgtagcataagcagtattcatttggattattttttttattagctctcaccccttcattattctgagctgaaagtctggcatgaactgtcctcaattttgttttcaaattcacatcgattatctatgcattatcctcttgtatctacctgtagaagtttctttttggttattccttgactgcttgattacagaaagaaatttatgaagctgtaatcgggatagttatactgcttgttcttatgattcatttcctttgtgcagttcttggtgtagcttgccactttcaccagcaaagttc

SEQ ID NO: 62 - DNA, 1191 bp, chlamydomonas reinhardtii
atggaaggaattgccaactccaggtggttgctgacgttgtgcgttccgttttctcctctccctcaggcctggcgcgccgctatgccccgcgtggtccccttctacgcggtcaagtgcaacccggagccgggtatcctgaagctgctgaacgcgctgggtgctggcttcgactgcgctagcaagggcgagctggacatgatgctgcgcatgggcgtctcgcccaaccgcattatctttgctcacccctgcaagcgcgcctcggacatccgctacgcgcgcgagcacaacgtgcagtacaccacgttcgacaccgtgtcggagctgcacaagatcgcgcagatgaaccccgacttcaagtgcgtgctgcgcatccgcgccgacgacccggacgcccgcgtgcctctgggcctgaagtacggcgctgaggtgtcggaggccgacgtgctgctgcgcacggcgaaggagctgggcctgcaggtggtgggcgtcagcttccacgttggcagcgcttgccagaacctgtccaccttctcgggcgccattgagaacgcgcgcaaggtgttcgacgaggccggcgccctgggcttcaacatggagctgctggatatcggcggtggcttcaccggccacttcgacgagatgggcaacgtgatgttcggcgagatcgcgaacaccatcaacgccgctctggccaccaacttcccgccggagatgggcgtgcgcgtcatcgccgagcccggccgctacttcgctgagaccagcagcacgctgctgacccccgtctacggccagcgcgaccgcgtggctgccgacggctccgtgaagaaggactactggctcaccgacggcctgtacggctccttcaactgcattctgtacgacggccagaaccctggctacaaggtcgtgcgctcgccgctgatggccgactcgaccgacagccgcaccttcctgtcgaccctgtggggtcccacctgcgacagcgctgactgcgtctacaaggacgtgaccctgcccgtgctgcgcaacggtgactggctgatgtggaacaacgccggcgcctacaccgtggccggtgcctgcgacttcaacggcatcgagttcaccactccgggcaagctgtacgtgtggtccgacagcgcggtggacgcggccgaggagggcgctgacgagcaggtcatgaacgcgtga

SEQ ID NO: 63 - protein, 396 aa, chlamydomonas reinhardtii
MEGIANSRWLLTLCVPFSPLPQAWRAAMPRVVPFYAVKCNPEPGILKLLNALGAGFDCASKGELDMMLRMGVSPNRIIFAHPCKRASDIRYAREHNVQYTTFDTVSELHKIAQMNPDFKCVLRIRADDPDARVPLGLKYGAEVSEADVLLRTAKELGLQVVGVSFHVGSACQNLSTFSGAIENARKVFDEAGALGFNMELLDIGGGFTGHFDEMGNVMFGEIANTINAALATNFPPEMGVRVIAEPGRYFAETSSTLLTPVYGQRDRVAADGSVKKDYWLTDGLYGSFNCILYDGQNPGYKVVRSPLMADSTDSRTFLSTLWGPTCDSADCVYKDVTLPVLRNGDWLMWNNAGAYTVAGACDFNGIEFTTPGKLYVWSDSAVDAAEEGADEQVMNA

SEQ ID NO: 64 - protein, 19 aa, Artificial sequence
  PS00878
  VARIANT (1)..(1): /replace = "Tyr"
  VARIANT (2)..(2): /replace = "Ala"
  UNSURE (3)..(3): Unknown amino acid
  VARIANT (5)..(5): /replace = "Ala" /replace = "Cys" /replace = "Val"
  VARIANT (6)..(6): /replace = "His" /replace = "Cys" /replace = "Leu" /replace = "Phe" /replace = "Trp"
  UNSURE (7)..(10): Unknown amino acid
  VARIANT (11)..(11): /replace = "Ile" /replace = "Val" /replace = "Met" /replace = "Phe"
  VARIANT (12)..(12): /replace = "Ile" /replace = "Val" /replace = "Met" /replace = "Thr" /replace = "Ala"
  UNSURE (13)..(14): Unknown amino acid
  VARIANT (15)..(15): /replace = "Ile" /replace = "Val" /replace = "Met" /replace = "Ala"
  UNSURE (16)..(18): Unknown amino acid
  VARIANT (19)..(19): /replace = "Thr" /replace = "Glu"
FPXKSNXXXXLLXXLXXXG

SEQ ID NO: 65 - protein, 18 aa, Artificial sequence
  PS00879
  VARIANT (1)..(1): /replace = "Ser" /replace = "Ala"
  UNSURE (2)..(3): Unknown amino acid
  UNSURE (4)..(7): Unknown amino acid or gap
  VARIANT (8)..(8): /replace = "Ile" /replace = "Val" /replace = "Met" /replace = "Ser" /replace = "Cys" /replace = "Pro"
  UNSURE (9)..(9): Unknown amino acid
  VARIANT (11)..(11): /replace = "Ile" /replace = "Val" /replace = "Met" /replace = "Phe"
  VARIANT (12)..(12): /replace = "Asn" /replace = "Ser"
  VARIANT (13)..(13): /replace = "Ile" /replace = "Val" /replace = "Met" /replace = "Cys" /replace = "Ala"
  VARIANT (17)..(17): /replace = "Ile" /replace = "Val" /replace = "Met" /replace = "Phe" /replace = "Tyr"
  VARIANT (18)..(18): /replace = "Ser" /replace = "Thr" /replace = "Pro" /replace = "Cys" /replace = "Glu" /replace = "Gln"
GXXXXXXLXNLDLGGGLG

SEQ ID NO: 66 - DNA, 1929 bp, Oryza sativa
atggctacttactactcgagccctggcaatgaaagggactcgcaagctatgtacccagcggattcaggcaattcatcatatcctgtgccatcagcaataggaaacatgttatatcctggcaatgggtcttctgggccatacacggaattcagtggcattatccagcatcagcagaatttcatggagctgcctggccatccaactgcgatctctcaagattcatcgtcacgggaacctaacatggtcgcgtcgtacatggatcagcgctcttttggacctgccaaagatatgagaaatgagatgttgatgcatctgatggatggagcacataatgctggtgctgatctcatccacaatgacactcatagcagcgcgcagattgagtttggcctattgaacaaccacaattcgatgagcgttgcaccagcaccaggccaaggattgtctctgagcctcaacacgcatatcctggcgccttcgtatccatactggtctgcgaaaacagagttgctaacaccacactcttaccatggtgatgacaacagaatgaagaatatgcaatctgaggcctcacaggcaatcagaaactcaaagtatctgaaagcagcacaagaattgcttgatgaggtcgtcagtgtttggaagagtataaagcagaaggctcagaaagaccaggctgaagcaggaaaatcagataacaaagaagccgaggggggttcgaaaggtgagggggtatcttccaacccacaggagtctactgccaatgctgcaccagagatttctgctgctgagaaacaagagctccagaataagatggcaaaacttatggccatgttggatgaggtggaccgaaagtacaaacactattatcatcaaatgcaaattgtagtctcatcttttgatatggttgctgggtctggagctgccaagccttatactgcagtggcccttcagacaatctcaaaacatttcagatgtctgaaagatgctatcaacgatcagatcaatgttatccggaagaaacttggagaggaggagagttcatctggcaaagagggaaaattaacgcgcctccgttatattgaccagcaattaagacaacagcgcgctttccagcagtatggtttgttacagcaaaatgcttggaggccacagaggggactgcccgaaaactcagtttcaattcttcgtgcttggctttttgaacacttccttcacccgtatccaaaagattcagaaaagctgatgctagcgagacaaactggcttaacaagaagtcagatttcaaattggttcataaatgcccgtgtccgcctgtggaaaccgatgatcgaagacatgtataaagaagagattggggaggcggatctcgactcgaactcctcctccgacaacgtaccaaggagcaaggacaaaatagcaacatctgaagataaggaagatctgaaaagctctatgagccagacttatcaaccaagccaattaggtgaatccaaagccaacatcgggatgatgagccttggtggggcaccagccggcttccacaacgaaggcacccaggatgacagcttcatgaacctaatgctgaaggaccaaaggccgggcgaagccgaaggcagcctcctccatgatgccgtcgcccatcattccgatgagaacgctcggttcatggcttaccatttgtcggggctcggaagatacgggaacagcaatgtgtcattgacacttggcttacagcatcctgacaacaggctttcggtacagaacactcatcagccaggtttcgccggtgctggagaagaaatttacaactccaccgcttctctcggtgtcgctgcagcttcctcttcggactacgaatccacgaaccaaatagatcaaaggcaacggttcgaaccatcgcctctaatgcatgattttgtggcctaa

SEQ ID NO: 67 - protein, 642 aa, Oryza sativa
MATYYSSPGNERDSQAMYPADSGNSSYPVPSAIGNMLYPGNGSSGPYTEFSGIIQHQQNFMELPGHPTAISQDSSSREPNMVASYMDQRSFGPAKDMRNEMLMHLMDGAHNAGADLIHNDTHSSAQIEFGLLNNHNSMSVAPAPGQGLSLSLNTHILAPSYPYWSAKTELLTPHSYHGDDNRMKNMQSEASQAIRNSKYLKAAQELLDEVVSVWKSIKQKAQKDQAEAGKSDNKEAEGGSKGEGVSSNPQESTANAAPEISAAEKQELQNKMAKLMAMLDEVDRKYKHYYHQMQIVVSSFDMVAGSGAAKPYTAVALQTISKHFRCLKDAINDQINVIRKKLGEEESSSGKEGKLTRLRYIDQQLRQQRAFQQYGLLQQNAWRPQRGLPENSVSILRAWLFEHFLHPYPKDSEKLMLARQTGLTRSQISNWFINARVRLWKPMIEDMYKEEIGEADLDSNSSSDNVPRSKDKIATSEDKEDLKSSMSQTYQPSQLGESKANIGMMSLGGAPAGFHNEGTQDDSFMNLMLKDQRPGEAEGSLLHDAVAHHSDENARFMAYHLSGLGRYGNSNVSLTLGLQHPDNRLSVQNTHQPGFAGAGEEIYNSTASLGVAAASSSDYESTNQIDQRQRFEPSPLMHDFVA

SEQ ID NO: 68 - DNA, 1944 bp, Oryza sativa
atggctacttactattcaagccctggtagcgaaagagactcgcagaccatgtactcaagagacccaggcagtgcatcctatcctatgtcatcagctctagggaacttgctctatctgaacaatccatcttctggaccttatacggagttcagcggcattctgcagcctcagcagaattgcatggagatgcctggccctgggcatgcgtcagcaatgtcacaagacccctcttcaagggagtccgacatgctttcttcgcaccagggtcaacgctctttcagccatgtcaaagatatgaaaaatgagatgttgatgcatatgatggatggagcacaaggtagtggctctgagctcatccatgatgatgcccacactggttcacagcttgagtttggtgttctgaataatcacaactcatcaagtgttccatcaatgcaaagccaagggctatctctgagcttgaacacacaaatcatggcgccttccttaccgtactggtctataaagccagacatgttaacgccgcagtcttaccatgacaaccttagaggggaagacatgcggatgaagaatttgcagtccgaagcttcacgcgcaatccggaactcaaggtatctcaaggcagcacaagaactgcttgatgaggtcgtgagtgtttggaagagcataaaacaaaaggctcagaaagagaaggttgaatcaggaaaagcagatggcaaagagactgatggagggccaaaaagtgagggtgtatcttctaatccacaagaatctggcgctaatgcagcacctgagctttccactgctgagaagcaagagcttcagaacaaaatggcaaaactgatggcaatgttggatgaggtggaccggaaatacaagcattattaccaccaaatgcaaaccgtggtttcatcgtttgatgtggtagctggaccaggatctgcgaagccttacacagcagttgctcttcagacaatctcacggcactttcggtgcctgaaggatgctatcaatgatcagatcaatgttatcaggaaaaagcttggcgaggaagagaactcatctggcaaggagggaaaattaacccgcctccggtacattgatcagcagctaaggcaacaacgtgctttccaacagtacggtatgattccacaaaacgcctggagaccacagaggggactgcctgaaaactctgttacaattcttcgcgcttggctgtttgaacacttcctccatccgtacccaaaagattccgagaagttaatgcttgctaggcagactggcctgactaggagtcagatttcgaattggttcataaatgcccgtgtccgcctttggaaaccaatgattgaagacatgtacaaagaagagattggtgatttagagcaagactccaactcttcctctgacaatgcaccaagaagtaaggataaaatggcatcttcagaagacaaggaggatctcaaaaactccagggcacggatttgcgaaacaagccaattgagcgagtcgagaaccagcattggagcaatgaatgttggcggagcgcctgttggcttccagaatgagcccaatcctgatgacagtttcatgaacctgatgctgaaggaccagcgatcgaacgaagtggatggcggcctccttctccacaacactgtcgcgcagcactcagacgagaacgcccggttcatggcctatcacttggcagagcttgggagatacggcaatggcaatgtgtcgctgacactgggcttgcagcactccagcagcaacctcgttcctaatgctcagccaggtttccctggtgttaatgaggatgacatctacaatgctactgctcctcttggtgtcaccgtcgcatcttcggactatgattcgatgaatcagatggatcaacggcaacggtttgagcattcacctcttctgcatgattttgtggcctga

SEQ ID NO: 69 - protein, 647 aa, Oryza sativa
MATYYSSPGSERDSQTMYSRDPGSASYPMSSALGNLLYLNNPSSGPYTEFSGILQPQQNCMEMPGPGHASAMSQDPSSRESDMLSSHQGQRSFSHVKDMKNEMLMHMMDGAQGSGSELIHDDAHTGSQLEFGVLNNHNSSSVPSMQSQGLSLSLNTQIMAPSLPYWSIKPDMLTPQSYHDNLRGEDMRMKNLQSEASRAIRNSRYLKAAQELLDEVVSVWKSIKQKAQKEKVESGKADGKETDGGPKSEGVSSNPQESGANAAPELSTAEKQELQNKMAKLMAMLDEVDRKYKHYYHQMQTVVSSFDVVAGPGSAKPYTAVALQTISRHFRCLKDAINDQINVIRKKLGEEENSSGKEGKLTRLRYIDQQLRQQRAFQQYGMIPQNAWRPQRGLPENSVTILRAWLFEHFLHPYPKDSEKLMLARQTGLTRSQISNWFINARVRLWKPMIEDMYKEEIGDLEQDSNSSSDNAPRSKDKMASSEDKEDLKNSRARICETSQLSESRTSIGAMNVGGAPVGFQNEPNPDDSFMNLMLKDQRSNEVDGGLLLHNTVAQHSDENARFMAYHLAELGRYGNGNVSLTLGLQHSSSNLVPNAQPGFPGVNEDDIYNATAPLGVTVASSDYDSMNQMDQRQRFEHSPLLHDFVA

SEQ ID NO: 70 - DNA, 1851 bp, Zea mays
atggctacttattactcgagccctggcagtgaaagagattcacaaacaatgtactcagcagagtcaggcaatgtatcatatcccgtgccatcagccctagggaactttctttatacgaacaatgcatcttctggaccttatacagaatttagtggaattgtccagcctcagcagaatttcatggaacttactggccatccttcagcaatgtcacatgattcgtcatccaatgaagctaccaacatgggcagttcactcactgaacagcgctcttttggtcctttgaaagatatgagaaatgagatgttgatgcatttgatggatggagcacacagcagtggcagtgatctcatccacaatgatgctcatagcactgtacagctcgaatttggcatgttaaacaaccacaactcaacaagtgttccattagcaccaggccaagggctgtctctgagcctcaatacacatatcttggcgccttcctatccacactggtctgcaaagcaagacttactaacaccaaattcttaccagggtgatgacaacagaatgaagaatatgcagtctgaggcctcacaggcaatccggaactctaagtatctgaaggcagcacaggagttacttgatgagattgtcagtgtttggaagtgtgttaaacagaaaacagataaaggccctgctgaagcaggaaaggctgatggaaaagagactgatggggggattaaaagtgagggggtatcttccaatccgcaagagtctggtgccaatgcagcagctgagctttcaactgctgagaaacaagagctccagaataagatggcaaaacttatgactatgttggacgaggtggataggaagtacaaacactattatcatcagatgcaacttgtaatgtcatcgtttaatatggttgctggtgctggagctgccaagccttatactgcagttgccctccagacaatctcacggcatttccgatgtctaaaggatgctatcaatgatcaaattagtgttatccggaagaaacttggagaggatgacaatacatccggcaaagagggcaaactaacccgccttcgttatattgatcagcaaataaggcaacagcgagctttccaacagtatggtatgctacagcaaaacgcttggaggccacagagaggactacctgaaaattcagtctcgattctccgggcttggctttttgaacacttccttcacccgtatccaaaagattctgaaaagctaatgttatcgagacaaactgggttgacaagaagtcagatttcaaactggttcatcaatgcccgtgtccggctgtggaagccaatgatcgaagacatgtacaaagaagagattggtgaggcggagctagactccaactcttcctccgacaacgggcagcgaaacaaggacaaagcaccatctcccgaagaaaatgaggacctgcagaccccaacaagccaggcttgccaaaccagccagctcggcgagtccaaagccatcgttggtggagtgatgggctttagtggagtgctagccggcggcttccacaccgaggccaaccccgacgacagcttcatgagcctgatgctgaaggcccagagacctggtgaaaccgaaggcaccggtctcctccacgatgccgtcgctcaccactccgacgacgagcgcccggttcatggcgtaccacctgacagagtttgggaggtatgggaacaacaacgtctcactgactctggggttgcagcacgccgagaacacccagccgggcttccccggcgtcagagaccaagacatctacaactccacagctcctctcaacgtcacctccacatcttcagagtatga

SEQ ID NO: 71 - protein, 616 aa, Zea mays
MATYYSSPGSERDSQTMYSAESGNVSYPVPSALGNFLYTNNASSGPYTEFSGIVQPQQNFMELTGHPSAMSHDSSSNEATNMGSSLTEQRSFGPLKDMRNEMLMHLMDGAHSSGSDLIHNDAHSTVQLEFGMLNNHNSTSVPLAPGQGLSLSLNTHILAPSYPHWSAKQDLLTPNSYQGDDNRMKNMQSEASQAIRNSKYLKAAQELLDEIVSVWKCVKQKTDKGPAEAGKADGKETDGGIKSEGVSSNPQESGANAAAELSTAEKQELQNKMAKLMTMLDEVDRKYKHYYHQMQLVMSSFNMVAGAGAAKPYTAVALQTISRHFRCLKDAINDQISVIRKKLGEDDNTSGKEGKLTRLRYIDQQIRQQRAFQQYGMLQQNAWRPQRGLPENSVSILRAWLFEHFLHPYPKDSEKLMLSRQTGLTRSQISNWFINARVRLWKPMIEDMYKEEIGEAELDSNSSSDNGQRNKDKAPSPEENEDLQTPTSQACQTSQLGESKAIVGGVMGFSGVLAGGFHTEANPDDSFMSLMLKAQRPGETEGTGLLHDAVAHHSDDERPVHGVPPDRVWEVWEQQRLTDSGVAARREHPAGLPRRQRPRHLQLHSSSQRHLHIFRV

SEQ ID NO: 72 - DNA, 1854 bp, Gymnadenia conopsea
atggctactttctatcccagttccactaaccgaagggatattatggcaaatctttatttgagagatacaggagggcattccatgtatcatgaaccagcagattctgacaatatagtctatcttaactactcatctggtccatattccgaagaatcccaacaaaatggcattgggtttaccgacttggttgcgtctcagcttggcgaaaattcttacagttcttggagggatgggaggaatgagatgctctttatgcaagaaaatgttggatcaatgaatggtggggatgaactcctttgcaattcggttactggtgatccccatatgggtattcagtcacagttgggtattttgaatgggcataacttgtctttgcagcactcgaacatttctaatgttcaaggtcaaggattgtctcttagtctcggctcgcagattccaattcatcctttcaagtatcagtctgctggatccgatgtctcagttttgaattcccatcactcgagccaaggaaattgtggtacatatagaaatgacgaatccagaattagatttccgaatgctagtatatggagttacggaggtacaaacatcagaagcaccattattcctaattccaagtaccttaagactgcccaacagttgcttgatgaggtggttaatgttcagaaggctttaaaaaagaagtctgatgataaccagagtgataacatttctagcaaacctacttgcaaagacaatgatgtggaatcgaagagtggcgggaacacattgaatcatgcaacaaattcttcgagtgaactatcatcttcagaaaggcaggatcttcagaacaaaatgacaaaacttctggctatgttggatgaggttgatcgaagatacaagcagtattaccatcaaatgcagatagttgcttcttcttttgacacaatagcaggttttggggctgcaaaaccttacacagctctcgccctccagacaatctcacggcactttaggagcctaagagatgctatcagcgatcggattcgatgcacaagaaaaatccttggcgagccagatgcctcagctggcaaaggatgcggaatttctcgtcttcgctacattgatcagcaaacaaggcaacagagggccatacaacagcttggtgtgatgccacggcatgcttggaggccacagagagggttgcctgagaactcagtcaccattcttcgagcttggctctttgagcactttcttcatccgtacccaagtgattctgaaaaacttgtgctatcaagacaaactggcttaaccagaagtcaggtttcaaattggttcatcaatgcacgcgttcgtctttggaagccgatggtcgaggatatgtacaaggaagagtttggtgagacggagatggactcgaactcttcctcagataatgcaaccaaatttagagacgaacttcactcaaacgacgcacaggaagaccagcgtaactcctcgaccgataaatatcatgcaaagcaatcaagctatgatcctggatatgaaactgatatgccgtgtgctgcttctggcttccagaatgagctacagggccatagaccgcaaagttcaacggacattgctcttctccaagacgccatccgccataccgacgagaattcgaggttcattggttatcagatgaatgagctcggcaggtacgcgaatggaggagtttcactcacgctcgggttacagcattgtgatagcaatattccaggttcagaaactcagcagcgctttgttcctatgaggggagaagatttatacaatggaggtccactgatggggtttggttcttcgaacacgatgcatgattttgttgcttga

SEQ ID NO: 73 - protein, 617 aa, Gymnadenia conopsea
MATFYPSSTNRRDIMANLYLRDTGGHSMYHEPADSDNIVYLNYSSGPYSEESQQNGIGFTDLVASQLGENSYSSWRDGRNEMLFMQENVGSMNGGDELLCNSVTGDPHMGIQSQLGILNGHNLSLQHSNISNVQGQGLSLSLGSQIPIHPFKYQSAGSDVSVLNSHHSSQGNCGTYRNDESRIRFPNASIWSYGGTNIRSTIIPNSKYLKTAQQLLDEVVNVQKALKKKSDDNQSDNISSKPTCKDNDVESKSGGNTLNHATNSSSELSSSERQDLQNKMTKLLAMLDEVDRRYKQYYHQMQIVASSFDTIAGFGAAKPYTALALQTISRHFRSLRDAISDRIRCTRKILGEPDASAGKGCGISRLRYIDQQTRQQRAIQQLGVMPRHAWRPQRGLPENSVTILRAWLFEHFLHPYPSDSEKLVLSRQTGLTRSQVSNWFINARVRLWKPMVEDMYKEEFGETEMDSNSSSDNATKFRDELHSNDAQEDQRNSSTDKYHAKQSSYDPGYETDMPCAASGFQNELQGHRPQSSTDIALLQDAIRHTDENSRFIGYQMNELGRYANGGVSLTLGLQHCDSNIPGSETQQRFVPMRGEDLYNGGPLMGFGSSNTMHDFVA

SEQ ID NO: 74 - DNA, 1938 bp, Solanum tuberosum
atggcgacttattttcctagtccaaacaatcaaagagatgctgatcagacatttcaatattttaggcaatctttgcctgagtcttattcagaagcttcaaatgctccagaaaacatgatggtattcatgaactattcttcttctggggcatattcagatatgttgacgggtacttcccaacaacaacacaactgcatcgatatcccatctataggagccacgcctttcaacacatcccaacaagaaatattgtcaaatcttggaggatcgcagatggggattcaggatttttcttcatggagagatagcagaaatgagatgctagctgataatgtctttcaagttgcacaaaatgtgcagggtcaaggattatccctcagtcttggctccaatataccatctggaattggaatttcacatgtccaatctcagaatcctaaccaaggtggcggttttaacatgtcctttggagatggtgataattcccaaccaaaagaacaaagaaatgcagattattttcctccggataatcctggaagggacttggatgctatgaaagggtataattctccatatggtacgtcgagtattgcaaggaccattcccagctcgaagtatttgaaagcagctcaatatttgcttgatgaggttgttagtgtcagaaaggccatcaaggagcaaaattctaagaaagagttgacaaaggattccagagagtctgatgtggactcgaaaaatatatcatcagatactcctgcaaatgggggttcaaatcctcatgagtccaaaaacaaccaaagtgaactttcacctaccgagaagcaagaagtgcagaacaaactggccaaacttctgtcaatgctggatgagattgatagaaggtacagacaatattatcatcagatgcaaatagtggtttcatcatttgatgtggtagctggagaaggagcagctaaaccatacacagctcttgctctccagacaatttcccgacacttccgttgcttgcgtgatgcaatctgcgatcagattcgagcatcacgaagaagtcttggagagcaagatgcttcagaaaacagcaaagcgattggaatatcacgcctgcgttttgtggatcatcatattagacagcagagagccctgcagcagcttggtatgatgcaacaacatgcctggaggcctcagaggggattgcctgaaagctctgtttcagttttgcgtgcttggctctttgagcactttcttcatccctacccgaaagattctgacaaaattatgctagcaaggcaaactggcttaacgagaagtcaggtatcaaattggttcataaatgcacgggtgcgtctttggaaacccatggttgaggaaatgtacaaagaagaggctggtgatgctaaaatagactcaaattcttcatcggatgttgcccccagacttgcaacaaaagactcaaaagttgaagaaagaggagaattgcaccagaatgcagcttcagaatttgagcagtacaatagtggccaaatcctggagtcaaaatctaaccatgaagctgatgtagaaatggagggagcaagtaatgcagaaactcaaagtcaatctggaatggaaaaccaaacaggcgaacccctgcctgctatggataattgcaccctttttcaggacgcatttgttcaaagcaacgatagattctcagaatttggtagttttggaagtggaaatgtactacccaatggagtttcacttacattggggctgcagcaaggtgaaggaagcaacctacctatgtccatcgaaactcacgttagttatgtaccattaagggcagatgacatgtatagtacagcacctactactatggtccctgaaacagcagaattcaactgcttggattctgggaataggcagcaaccattttggctcctaccatctgctacatga

SEQ ID NO: 75 - protein, 645 aa, Solanum tuberosum
MATYFPSPNNQRDADQTFQYFRQSLPESYSEASNAPENMMVFMNYSSSGAYSDMLTGTSQQQHNCIDIPSIGATPFNTSQQEILSNLGGSQMGIQDFSSWRDSRNEMLADNVFQVAQNVQGQGLSLSLGSNIPSGIGISHVQSQNPNQGGGFNMSFGDGDNSQPKEQRNADYFPPDNPGRDLDAMKGYNSPYGTSSIARTIPSSKYLKAAQYLLDEVVSVRKAIKEQNSKKELTKDSRESDVDSKNISSDTPANGGSNPHESKNNQSELSPTEKQEVQNKLAKLLSMLDEIDRRYRQYYHQMQIVVSSFDVVAGEGAAKPYTALALQTISRHFRCLRDAICDQIRASRRSLGEQDASENSKAIGISRLRFVDHHIRQQRALQQLGMMQQHAWRPQRGLPESSVSVLRAWLFEHFLHPYPKDSDKIMLARQTGLTRSQVSNWFINARVRLWKPMVEEMYKEEAGDAKIDSNSSSDVAPRLATKDSKVEERGELHQNAASEFEQYNSGQILESKSNHEADVEMEGASNAETQSQSGMENQTGEPLPAMDNCTLFQDAFVQSNDRFSEFGSFGSGNVLPNGVSLTLGLQQGEGSNLPMSIETHVSYVPLRADDMYSTAPTTMVPETAEFNCLDSGNRQQPFWLLPSAT

SEQ ID NO: 76 - DNA, 2076 bp, Vitis vinifera
atggctacatattaccctagttcaaataatcaaagagatgctgcccctatgcattatttaagggaacctttgcccacatcatattcggaagttcctgttcttcccactaatatgatgtatatgagctacccatcgtcttctgggtcatactcggacrcattggctgggaatgcccagcagcacaaccacaactgcattgaaattccatctgtggcagcttccgactccacccaaccgcagcatgaaatcttgtcaagccttagtgggtcacatatagtggaacatgatttcagcgcatggagggatggtaaaaatgagatgctagttatgaactcactgggtggccctgcaagccttcttcacaccgggcagcatttgcaggctcagggcttgtcccttagtcttggcacacaaatcccctcaggaatccaaattccttccattcaatatcggaatcccaatcagggtttcacctcattcttgagtcctacttcatcagtgtcgggtgaaggtggtggcaggagtggctcttctagggatgaacagttgagaaatgctgaatttttgccaccaggtgttcttggagctaatcaagattcaattaaaggggatccatcttcatatggaatgtcaagtattgcgaggaccattccccattccaagtacttaaaggcagcccagcaactgcttgatgaagttgttaatgttcgaaaagctttgaagcagcctgattctgagaaaaaccaaaacatacatgagctttggaagggttccaaagaggccgatgtgggtttgaagaatggaactggtatgactcctgcagcttcaaaccctcaagagcctgtcagcaattcctcaagtgagctttctcctgctgaaagacaggatttacaaaacaagttgacaaagcttttggccatgttagatgaggttgatagaaggtacaaacagtattatcaccagatgcagattgtggtatcatcatttgatgtgatagcaggatctggggctgcaaaaccctacacagcacttgccctccagacaatttctcgccacttccgctgcttgcgtgatgcaatcactggccagattcgagcaacgcgaagaagycttggggagcaagatacttcaggaaacggcaaaggggttggaatatctcgcctgcgatatgtggaccagcagctcaggcaacagagggctcttcagcagcttggtatgatgcaacaacatgcctggaggccacagagggggctgcctgaaagytctgtttctattcttcgtgcttggctatttgagcacttccttcatccctacccaaaagattctgataagatcatgctggcaaggcagacaggcttgaccaggagtcaggtctcaaactggtttataaatgcgcgggtgcgtctctggaagcccatggtggaagagatgtacaaagaagagataggtgatgcagatatggactctaattcttcgtccgaaaatgcacccaaagcgacaaaaagtgatatcagggcatctgaggaaagaggtgatgattttcagccaagcacaacttccacggyaaccgagagatgcagcactggccgatttcttgactccaaatccagtaatgctcccgatgtagagatggggggaccaactgyaggagccagtttcagaaatggggaacggggtgaaacccaaactgaatatggaatagtgaaattaagcggggaccaaaggcctagcgtggaggaatgcagcagcctcttcccagatggcattgttcagtctgatgggggcagcgataggttcatggcagccgctgctgcagcataccacatgtcagagttggggaggttcggaagtggaactggggtatctcttacattggggttgcagcattgcgagggaggcagcttacccatttccaatggaggtcatcacagttttgtgggtatgcggggggccgatatgtacaacccagcagcttcttcagtggggactgacacggccgatttygactgcatggatcctggcaaccggcagcacagattcagctcctcccatctattacatgattttgtagcctga

SEQ ID NO: 77 - protein, 691 aa, Vitis vinifera
  UNSURE (53)..(53): Unknown amino acid
  UNSURE (522)..(522): Unknown amino acid
  UNSURE (549)..(549): Unknown amino acid
MATYYPSSNNQRDAAPMHYLREPLPTSYSEVPVLPTNMMYMSYPSSSGSYSDXLAGNAQQHNHNCIEIPSVAASDSTQPQHEILSSLSGSHIVEHDFSAWRDGKNEMLVMNSLGGPASLLHTGQHLQAQGLSLSLGTQIPSGIQIPSIQYRNPNQGFTSFLSPTSSVSGEGGGRSGSSRDEQLRNAEFLPPGVLGANQDSIKGDPSSYGMSSIARTIPHSKYLKAAQQLLDEVVNVRKALKQPDSEKNQNIHELWKGSKEADVGLKNGTGMTPAASNPQEPVSNSSSELSPAERQDLQNKLTKLLAMLDEVDRRYKQYYHQMQIVVSSFDVIAGSGAAKPYTALALQTISRHFRCLRDAITGQIRATRRSLGEQDTSGNGKGVGISRLRYVDQQLRQQRALQQLGMMQQHAWRPQRGLPESSVSILRAWLFEHFLHPYPKDSDKIMLARQTGLTRSQVSNWFINARVRLWKPMVEEMYKEEIGDADMDSNSSSENAPKATKSDIRASEERGDDFQPSTTSTXTERCSTGRFLDSKSSNAPDVEMGGPTXGASFRNGERGETQTEYGIVKLSGDQRPSVEECSSLFPDGIVQSDGGSDRFMAAAAAAYHMSELGRFGSGTGVSLTLGLQHCEGGSLPISNGGHHSFVGMRGADMYNPAASSVGTDTADFDCMDPGNRQHRFSSSHLLHDFVA

SEQ ID NO: 78 - DNA, 1884 bp, Medicago truncatula
atgtatccgaaccaagcgttttcttcgggatcttacgccgagatgatttctgggaatactttgttacctcataattacagtgaatctgtaggaggacaaaatgagttgaagtttatgacatctatggatgatacaatgaatatgctgtctattgatcaggggcattccaatgctactacgagcgatccaaggacacaattcggactcgttgagagcgagcaaaatgtacaatgccaaggcctgtctcttagccttgggacaatgatgccttcctttcaatatcagtatcccggcaacagtttcacctcactaatgaatgctcaaatttcaaacttgaaggggtctgcatctcttaaggatgatgaggctgagtgcatggcatctttgtcttctggaggatttcaaaacaatgtcaaaagggagggtttgtataatccacatccttcaataggccttaatgaaggccaatctgatccgtgcctgcaaggatcagcagttattccgaacaatgcccttaactctcactaccttaaggcagcacaggaacttcttgatgaaatagttaatgtccgaaagggcttgaaacaaaccggattggaaaaacaacaaagttttcacgatgctggtttagatgcttccaaagattctgatggaaaatctacaagtcaatctatgcaagtatcttcaggccctaatggttctaatgcaaacaactcttcatgtgagctatctcccgcggaacgacagcatttattggacaagaaaacaaaacttttgtccatgttggatgagttagacaaaagataccgacaatactgtcatcaaatgcagattgttgtgtcatcttttgacatggttgctggttgcggcgcagccgaaccatacactgctcttgctttgcgcaccatttctcgtcactttcgctgtttgcgtgatgctattagcggccaaattcagttgactcaaaggagccttggtgaacaagagggaatacctcgtctccgctatgttgatcaacagcttagacaacaaaaagctcttcagcagcttggtgtaatgagacaagcttggagacctcagagaggacttcctgaaagctctgtgtcaatactccgtgcgtggctctttgagcatttccttcatccttatccaaaggattcagagaaaatcatgttggcaagacaaacaggcttgaccagaaaccaggtggcgaattggttcattaatgcgagggtgcgtctttggaaaccaatggtcgaagaaatgtacaaagaagagtttggtgattcggagacaagcagcaatcttttatcagaaaacacgccaaaagctccgagagacgatgatgttcgagtgtgggatgataaaagggaagagtctcatgacaagttaatgaatgttgatggtgctcaacaacaaggtcaaattgcagggttgaagttagatcatgcatcctcctcaaccacagaattggatagagggattcaaagtagcgatcattggactaatgtgatggattctagaattgggaaaatgcaaggtgaccaacaaaggtttaacatgaacaatagtccttattcaaatccacctatctcaatcaaccaaaatggtgatggctgcataatggattctactcctacaacttatgatgatttatcagagttgaataactttggtgttggtggccatgtctcacttgcattggagttgaggaactctgaaagtgatggatttggtttgtccaatgatgacatcaataaaaggcgtaatcaagcaatggcttcttcacctgatactgatttgttagactatcacttcacagacactggaaagcaacaacacaagtttgccaaccctcatttgttacatgagtttgttgtctga

SEQ ID NO: 79 - protein, 627 aa, Medicago truncatula
MYPNQAFSSGSYAEMISGNTLLPHNYSESVGGQNELKFMTSMDDTMNMLSIDQGHSNATTSDPRTQFGLVESEQNVQCQGLSLSLGTMMPSFQYQYPGNSFTSLMNAQISNLKGSASLKDDEAECMASLSSGGFQNNVKREGLYNPHPSIGLNEGQSDPCLQGSAVIPNNALNSHYLKAAQELLDEIVNVRKGLKQTGLEKQQSFHDAGLDASKDSDGKSTSQSMQVSSGPNGSNANNSSCELSPAERQHLLDKKTKLLSMLDELDKRYRQYCHQMQIVVSSFDMVAGCGAAEPYTALALRTISRHFRCLRDAISGQIQLTQRSLGEQEGIPRLRYVDQQLRQQKALQQLGVMRQAWRPQRGLPESSVSILRAWLFEHFLHPYPKDSEKIMLARQTGLTRNQVANWFINARVRLWKPMVEEMYKEEFGDSETSSNLLSENTPKAPRDDDVRVWDDKREESHDKLMNVDGAQQQGQIAGLKLDHASSSTTELDRGIQSSDHWTNVMDSRIGKMQGDQQRFNMNNSPYSNPPISINQNGDGCIMDSTPTTYDDLSELNNFGVGGHVSLALELRNSESDGFGLSNDDINKRRNQAMASSPDTDLLDYHFTDTGKQQHKFANPHLLHEFVV

SEQ ID NO: 80 - DNA, 2043 bp, Arabidopsis thaliana
atggctgcttactttcacggaaacccaccggagatctctgccggatccgacggtggtcttcaaacgttgatcctcatgaatccaactacttacgttcagtacacccaacaagacaacgactcgaacaacaacaacaacagcaacaatagcaacaacaacaacacaaacacaaacacaaacaacaacaacagtagtttcgttttcctcgattcccacgcgccgcagccaaacgcgagccagcagttcgtcggaataccactctcaggtcacgaagctgcttccattacagccgccgacaacatctccgtacttcacggttatcctccgcgcgtgcagtacagtctctacggtagccaccaagtggatcccactcaccagcaagccgcgtgtgagacgccacgcgcgcagcaaggcctctctttaaccctctcgtctcaacagcagcagcaacagcaacatcatcaacaacaccagcctattcacgtcggattcgggtccggacatggagaagatatccgggtcgggtctggctctacaggatcgggggtaacaaacggtatagctaatcttgttagctccaagtacttgaaggcagcacaagagcttcttgacgaagtagtcaacgctgattccgatgacatgaacgctaaatcccaactattctcatcgaaaaagggtagttgcggaaatgataaacctgtcggagaatcatcggccggcgctggaggagaaggttccggtggcggagcagaagcagccgggaaacgtccggtggagctaggcacggcagagagacaagaaatacagatgaagaaagcaaaacttagtaacatgcttcatgaggtggagcagagatatagacagtaccaccagcagatgcagatggtgatctcttcgttcgagcaagcggcagggataggatcagcgaagtcatacacgtcgctagcattgaaaaccatatcaagacagttccgttgcttgaaagaggcgatcgctggtcagataaaagcggccaacaagagtcttggggaggaagattcagtgtctggtgttgggaggtttgaggggtcgaggctcaagttcgtggaccaccacttgagacagcaaagagctcttcaacaactgggaatgattcaacatccttccaataatgcttggagacctcaacgtggtctcccagaacgagccgtctcagttctccgtgcttggctcttcgaacactttcttcatccataccctaaggattcggacaagcacatgctagctaagcaaacaggactcactcgtagccaggtgtcgaactggtttataaacgcgagagttcggttatggaaaccaatggtggaggagatgtacatggaggaaatgaaggagcaggcaaagaacatgggatccatggaaaagactcctttggatcaaagcaacgaagattctgcttcaaagtcaacaagtaaccaagaaaagagcccaatggcggacactaattaccatatgaatcccaatcacaacggtgacctagaaggcgtcactggaatgcaaggaagccccaagagactaagaaccagcgacgagacaatgatgcagccaataaatgcggatttcagctccaacgagaagctcacgatgaagattctagaagaacggcaagggataagatcagatggtggctaccctttcatgggtaatttcgggcaataccaaatggatgagatgtcaagatttgatgtagtctcagaccaggagctcatggcgcaaaggtactcaggaaacaacaatggcgtgtccctcacgttaggtttacctcattgtgatagcttgtcgtccacgcaccatcagggtttcatgcagacccaccatgggattcctatagggagaagagtgaaaataggagaaacagaggaatatggacccgccaccatcaatggtggtagctcgaccacaaccgcacattcatcagcggcagctgccgcggcttacaatgggatgaacatacagaaccagaagagatatgtggctcagttattgcccgacttcgttgcataa

SEQ ID NO: 81 - protein, 680 aa, Arabidopsis thaliana
MAAYFHGNPPEISAGSDGGLQTLILMNPTTYVQYTQQDNDSNNNNNSNNSNNNNTNTNTNNNNSSFVFLDSHAPQPNASQQFVGIPLSGHEAASITAADNISVLHGYPPRVQYSLYGSHQVDPTHQQAACETPRAQQGLSLTLSSQQQQQQQHHQQHQPIHVGFGSGHGEDIRVGSGSTGSGVTNGIANLVSSKYLKAAQELLDEVVNADSDDMNAKSQLFSSKKGSCGNDKPVGESSAGAGGEGSGGGAEAAGKRPVELGTAERQEIQMKKAKLSNMLHEVEQRYRQYHQQMQMVISSFEQAAGIGSAKSYTSLALKTISRQFRCLKEAIAGQIKAANKSLGEEDSVSGVGRFEGSRLKFVDHHLRQQRALQQLGMIQHPSNNAWRPQRGLPERAVSVLRAWLFEHFLHPYPKDSDKHMLAKQTGLTRSQVSNWFINARVRLWKPMVEEMYMEEMKEQAKNMGSMEKTPLDQSNEDSASKSTSNQEKSPMADTNYHMNPNHNGDLEGVTGMQGSPKRLRTSDETMMQPINADFSSNEKLTMKILEERQGIRSDGGYPFMGNFGQYQMDEMSRFDVVSDQELMAQRYSGNNNGVSLTLGLPHCDSLSSTHHQGFMQTHHGIPIGRRVKIGETEEYGPATINGGSSTTTAHSSAAAAAAYNGMNIQNQKRYVAQLLPDFVA

SEQ ID NO: 82 - DNA, 1603 bp, Arabidopsis thaliana
atggagaattatccagaaacacagtttattcccggagattcaatgatccagaatgctatagtttcttactctgaggaatcagccggtagagaaagaagaactgaagctaacaatgtctcagcctcacaagagaggcaagcattgtccagatttgggggagttccacaaatgcagaacattggtcaagatttcggttcttggagagatcaagcgagtgacaggaacggtttccagctaatgagcgcgatggcaggtgccacggggattcttcagaccggtcagggactgtcccttagccttggttcacagattcttccaggaattcatcagataagccatcaaaatatggcgccgagaggcaatgagtatgcaacacagagttttccgggcgggaatcagaacttggatgttgtgagaacaattcccaactcaaagtatcttaaggcggctcaacagcttctagatgaggctgttaatgtaaagaaagctctaaagcagtttcaggcagagggagataaaaacaatgagaaccctcaagaaccgaatcagagcactcaagactcgagcacgaatcctcctgcggacatctctcagtcggagagacaagaaatgcagagcaagttgacaaaactcttgtcaatgttggatgaggtggatagaagatataagcaatattaccagcagatgcagatagttgtatcctcgttcgatgtgatagctggttatggagcagctaagccatacacagcactcgcccttcaaacaatttctcgccattttcgtagcctaagggatgcgatatccggacaaatcctcgtgctacgtaaatgccttggggaacaacaagatggatcagatgggaaaagagttgggattataagccggcttaagtacgttgatcaacatttaagacaacaaagaggttttatgcaacctcaagcttggagacctcaacgcggtctacctgaaaactctgttttgattctccgtgcttggctctttgagcattttcttcacccttacccaaaggattctgataagatcatgctagcaagacaaacgggcttgagccgcggtcaggtttcaaactggttcataaatgcacgagtgcgtttatggaagccaatggtggaggagatatacaaggaggaattcacagagaatgattccaactcgtcttccgaaaatacaccgaaaatgtctgagataggacctgttgctgctgatgatgaagatcgagctcgagagttttcacaagaccagaccaaaccggaccatggacatggatatggcgaggaaactcgtggcatggtccaaggcagtcatatggatggtcgccggttcatggcagttgagcctacatatcatgtggctgatacgtcaagattgggtcgtggtgatgtgtccttgactctagggcttcaaaactctcaaggacaggacaatgttgtggctatgtctagtgaggcatacaacaacttttccggggtggatatttacgagaatgccatcccgggagatgaaatggagtatgtaaaccccggaagtcgccagaaccggataaattcttcacaattggtacatgattttgtagcttgaagaa

SEQ ID NO: 83 - protein, 532 aa, Arabidopsis thaliana
MENYPETQFIPGDSMIQNAIVSYSEESAGRERRTEANNVSASQERQALSRFGGVPQMQNIGQDFGSWRDQASDRNGFQLMSAMAGATGILQTGQGLSLSLGSQILPGIHQISHQNMAPRGNEYATQSFPGGNQNLDVVRTIPNSKYLKAAQQLLDEAVNVKKALKQFQAEGDKNNENPQEPNQSTQDSSTNPPADISQSERQEMQSKLTKLLSMLDEVDRRYKQYYQQMQIVVSSFDVIAGYGAAKPYTALALQTISRHFRSLRDAISGQILVLRKCLGEQQDGSDGKRVGIISRLKYVDQHLRQQRGFMQPQAWRPQRGLPENSVLILRAWLFEHFLHPYPKDSDKIMLARQTGLSRGQVSNWFINARVRLWKPMVEEIYKEEFTENDSNSSSENTPKMSEIGPVAADDEDRAREFSQDQTKPDHGHGYGEETRGMVQGSHMDGRRFMAVEPTYHVADTSRLGRGDVSLTLGLQNSQGQDNVVAMSSEAYNNFSGVDIYENAIPGDEMEYVNPGSRQNRINSSQLVHDFVA

SEQ ID NO: 84 - DNA, 1827 bp, Oryza sative
gcttgagtcatagggagaaaacaaatcgatcatatttgactcttttccctccatctctcttaccggcaaaaaaagtagtactggtttatatgtaaagtaagattctttaattatgtgagatccggcttaatgcttttcttttgtcacatatactgcattgcaacaattgccatatattcacttctgccatcccattatatagcaactcaagaatggattgatatatcccctattactaatctagacatgttaaggctgagttgggcagtccatcttcccaacccaccaccttcgtttttcgcgcacatacttttcaaactactaaatggtgtgttttttaaaaatattttcaatacaaaagttgctttaaaaaattatattgatccatttttttaaaaaaaatagctaatacttaattaatcacgtgttaaaagaccgctccgttttgcgtgcaggagggataggttcacatcctgcattaccgaacacagcctaaatcttgttgtctagattcgtagtactggatatattaaatcatgttctaagttactatatactgagatgaatagaataagtaaaattagacccaccttaagtcttgatgaagttactactagctgcgtttgggaggacttcccaaaaaaaaaagtattagccattagcacgtgattaattaagtactagtttaaaaaacttaaaaaataaattaatatgattctcttaagtaactctcctatagaaaacttttacaaaattacaccgtttaatagtttggaaaatatgtcagtaaaaaataagagagtagaagttatgaaagttagaaaaagaattgttttagtagtatacagttataaactattccctctgttctaaaacataagggattatggatggattcgacatgtaccagtaccatgaatcgaatccagacaagttttttatgcatatttattctactataatatatcacatctgctctaaatatcttatatttcgaggtggagactgtcgctatgtttttctgcccgttgctaagcacacgccacccccgatgcggggacgcctctggccttcttgccacgataattgaatggaacttccacattcagattcgataggtgaccgtcgactccaagtgctttgcacaaaacaactccggcctcccggccaccagtcacacgactcacggcactaccacccctgactccctgaggcggacctgccactgttctgcatgcgaagctatctaaaattctgaagcaaagaaagcacagcacatgctccgggacacgcgccacccggcggaaaagggctcggtgtggcgatctcacagccgcatatcgcatttcacaagccgcccatctccaccggcttcacgaggctcatcgcggcacgaccgcgcacggaacgcacgcggccgacccgcgcgcctcgatgcgcgagcccatccgccgcgtcctccctttgcctttgccgctatcctctcggtcgtatcccgtttctctgtcttttgctccccggcgcgcgccagttcggagtaccagcgaaacccggacacctggtacacctccgccggccacaacgcgtgtccccctacgtggccgcgcagcacatgcccatgcgcgacacgtgcacctcctcatccaaactctcaagtctcaacggtcctataaatgcacggatagcctcaagctgctcgtcacaaggcaagaggcaagaggcaagagcatccgtattaaccagccttttgagacttgagagtgtgtgtgactcgatccagcgtagtttcagttcgtgtgttggtgagtgattccagccaagtttgcg

SEQ ID NO: 85 - DNA, 659 bp, Oryza sative
gctaagtgagctagccactgatcagaagaacacctcgatctctgagagtgttttttcagctttagcttaagcaggatggagcaccaggggcagcacggccacgtgaccagccgcgtcgacgagtacggcaacccggtcggcaccggcgccggacacggccagatgggcaccgccggcatggggacgcacggcaccgccggcaccggcggcggccagttccagccgatgagggaggagcacaagaccggcggcgtcctgcaacgctccggcagctccagctcaagctcgtctgaggatgatggaatgggagggaggaggaagaaggggatcaaggagaagatcaaggagaagctccccggcggcaacaagggcgagcagcagcatgccatgggcggcaccggcaccggcaccggcaccggcaccggaaccggcggcgcctacgggcagcagggccacggcaccgggatgaccaccggcaccaccggcgcacacggcaccaccaccaccgacaccggcgagaagaagggcatcatggacaagatcaaggagaagctgcccggccagcactgagctcgacacaccaccacaccatgtgtctgcgcccccggcgaccgccgccacgtcaccttcctgaataataagatgagctaaccgagcgc

SEQ ID NO: 86 - DNA, 55 bp, Artificial sequence
  primer: prm08627
ggggacaagtttgtacaaaaaagcaggcttaaacaatggctacttactactcgag

SEQ ID NO: 87 - DNA, 46 bp, Artificial sequence
  primer: prm08628
ggggaccactttgtacaagaaagctgggtttaggccacaaaatcat

SEQ ID NO: 88 - DNA, 972 bp, Arabidopsis thaliana
atggtgaggcctccttgttgtgacaaaggaggagtgaagaaagggccatggactcctgaagaagatatcattttagtcacttacatccaagaacatggtcctggtaattggagagctgttcctaccaatactgggctgcttagatgcagcaagagttgtagacttagatggacaaactatttaaggccaggaatcaaaagaggcaatttcacagaacatgaagaaaagatgattgttcatctccaagccctcttaggaaatagatgggctgcaattgcgtcatatcttccacaaaggacagacaatgacattaagaactattggaacactcatttgaagaagaaactcaacaaagtcaatcaagattctcatcaagaacttgaccgttcctcgctctcatcttcaccatcgtcttcttctgctaattccaactcaaacatctcaagaggccaatgggaaaggcgacttcaaaccgatatccacttggcgaaaaagtctctctctgaggctttatctcctgccgttgcaccaatcattacatctacagtgacaacaacgtcttcctctgctgaatcaagacgctctacttcctcagctagcgggtttcttaggacgcaagaaacatctacaacttatgcctcaagcaccgaaaatatcgcgaaattgctcaaagggtgggtgaaaaactcgccgaagactcaaaactccgcggatcaaatcgcttctacagaggtaaaagaagtgatcaagagtgatgatgggaaggagtgtgcaggggcatttcagtcattttctgagtttgatcactcatatcaacaggctggtgtttcacctgatcatgagaccaaaccagacataactggatgctgcagtaaccaaagtcaatggtctttgtttgagaagtggttgtttgaggattctggtggacagattggtgatattctattggatgaaaacactaatttcttctga

SEQ ID NO: 89 - protein, 323 aa, Arabidopsis thaliana
MVRPPCCDKGGVKKGPWTPEEDIILVTYIQEHGPGNWRAVPTNTGLLRCSKSCRLRWTNYLRPGIKRGNFTEHEEKMIVHLQALLGNRWAAIASYLPQRTDNDIKNYWNTHLKKKLNKVNQDSHQELDRSSLSSSPSSSSANSNSNISRGQWERRLQTDIHLAKKSLSEALSPAVAPIITSTVTTTSSSAESRRSTSSASGFLRTQETSTTYASSTENIAKLLKGWVKNSPKTQNSADQIASTEVKEVIKSDDGKECAGAFQSFSEFDHSYQQAGVSPDHETKPDITGCCSNQSQWSLFEKWLFEDSGGQIGDILLDENTNFF

SEQ ID NO: 90 - DNA, 972 bp, Arabidopsis thaliana
atggtgaggcctccttgttgtgacaaaggaggagtgaagaaagggccatggactcctgaagaagatatcattttagtcacttacatccaagaacatggtcctggtaattggagagctgttcctaccaatactgggctgcttagatgcagcaagagttgtagacttagatggacaaactatttaaggccaggaatcaaaagaggcaatttcacagaacatgaagaaaagatgattgttcatctccaagccctcttaggaaatagatgggctgcaattgcgtcatatcttccacaaaggacagacaatgacattaagaactattggaacactcatttgaagaagaaactcaacaaagtcaatcaagattctcatcaagaacttgaccgttcctcgctctcatcttcaccatcgtcttcttctgctaattccaactcaaacatctcaagaggccaatgggaaaggcgacttcaaaccgatatccacttggcgaaaaaggctctctctgaggctttatctcctgccgttgcaccaatcattacatctacagtgacaacaacgtcttcctctgctgaatcaagacgctctacttcctcagctagcgggtttcttaggacgcaagaaacatctacaacttatgcctcaagcaccgaaaatatcgcgaaattgctcaaagggtgggtgaaaaactcgccgaagactcaaaactccgcggatcaaatcgcttctacagaggtaaaagaagtgatcaagagtgatgatgggaaggagtgtgcaggggcatttcagtcattttctgagtttgatcactcatatcaacaggctggtgtttcacctgatcatgagaccaaaccagacataactggatgctgcagtaaccaaagtcaatggtctttgtttgagaagtggttgtttgaggattctggtggacagattggtgatattctattggatgaaaacactaatttcttctga

SEQ ID NO: 91 - protein, 323 aa, Arabidopsis thaliana
MVRPPCCDKGGVKKGPWTPEEDIILVTYIQEHGPGNWRAVPTNTGLLRCSKSCRLRWTNYLRPGIKRGNFTEHEEKMIVHLQALLGNRWAAIASYLPQRTDNDIKNYWNTHLKKKLNKVNQDSHQELDRSSLSSSPSSSSANSNSNISRGQWERRLQTDIHLAKKALSEALSPAVAPIITSTVTTTSSSAESRRSTSSASGFLRTQETSTTYASSTENIAKLLKGWVKNSPKTQNSADQIASTEVKEVIKSDDGKECAGAFQSFSEFDHSYQQAGVSPDHETKPDITGCCSNQSQWSLFEKWLFEDSGGQIGDILLDENTNFF

SEQ ID NO: 92 - DNA, 843 bp, Arabidopsis thaliana
atgggtaggcctccatgctgtgacaagatagggatcaagaaaggaccatggactcctgaagaagatatcattcttgtttcttacattcaagaacatggtcctggaaactggagatcagttcccaccaacactgggttattgagatgcagcaaaagttgtagactgagatggacaaattatctgagacctggaattaaacgtggaaactttactcctcatgaagaaggaatgatcattcacttgcaagccttattgggtaacaaatgggcgtccatagcttcatacctaccacaaagaacggacaatgatatcaagaactactggaacacacatttaaagaagaagctcaacaagtctgacagtgatgagaggagcagatcagagaacattgcgctgcaaacttcttcgacaagaaacaccattaatcatagatctacctatgcttcaagcaccgaaaacatttcccgccttcttgagggttggatgagagcgtctccaaagagtagtacaagtactactttcttggaacacaaaatgcagaaccggacaaacaatttcatcgatcatcacagcgatcagtttccatacgagcagcttcaaggttcttgggaagagggtcatagcaaaggaatcaacggggatgatgaccagggtataaagaattcagagaataacaacggtgatgatgttcatcatgaagatggtgatcatgaggatgatgatgatcataatgctacaccaccattgacatttattgagaaatggcttttggaggaaacaagtactactgggggtcaaatggaagagatgagccacttgatggagctctctaatatgctttaa

SEQ ID NO: 93 - protein, 280 aa, Arabidopsis thaliana
MGRPPCCDKIGIKKGPWTPEEDIILVSYIQEHGPGNWRSVPTNTGLLRCSKSCRLRWTNYLRPGIKRGNFTPHEEGMIIHLQALLGNKWASIASYLPQRTDNDIKNYWNTHLKKKLNKSDSDERSRSENIALQTSSTRNTINHRSTYASSTENISRLLEGWMRASPKSSTSTTFLEHKMQNRTNNFIDHHSDQFPYEQLQGSWEEGHSKGINGDDDQGIKNSENNNGDDVHHEDGDHEDDDDHNATPPLTFIEKWLLEETSTTGGQMEEMSHLMELSNML

SEQ ID NO: 94 - DNA, 993 bp, Arabidopsis thaliana
atgggtagaccaccttgttgcgagaagattgaggtgaagaaaggaccatggactcccgaagaagacataatcttggtctcttatatccaacaacacggccctggaaattggagatctgtccctgcaaacaccggtttgctaaggtgtagcaagagttgcagacttagatggactaattaccttcgtcccgggatcaaacgaggaaatttcactcaaccggaagagaagatgatcatccaccttcaagctcttttgggaaatagatgggcagctatagcatcatatctacctcagaggaccgacaatgatatcaagaactactggaacactcatcttaaaaagaaactagtgatgatgaagtttcaaaatggtatcatcaacgaaaacaaaaccaatctggcaacagatatttcgtcttgtaataataacaacaatggatgtaatcacaacaaaaggaccaccaacaaaggccaatgggagaaaaaacttcaaacagacatcaacatggccaaacaagccttattccaagccttgtcacttgaccaaccatcttcattgatccctcccgatcctgactcaccaaaacctcatcatcattctaccaccacttatgcctcaagcacagataacatctctaaattactccagaactggacaagctcatcatcgtcaaagcctaacacttcatcagtctccaacaaccggagctcaagccccggtgaaggaggactttttgatcatcactctttgttctcatcgaattcagaatctggatcagttgatgagaagctgaatttgatgtccgagacaagcatgttcaaaggtgagagcaagccagacatagacatggaagctacacctactactactactactgatgatcaaggctcgttgtcattgatcgagaaatggttgtttgatgatcaaggcttggttcagtgtgatgatagtcaagaagatctcatcgacgtgtctttagaggagttaaaataa

SEQ ID NO: 95 - protein, 330 aa, Arabidopsis thaliana
MGRPPCCEKIEVKKGPWTPEEDIILVSYIQQHGPGNWRSVPANTGLLRCSKSCRLRWTNYLRPGIKRGNFTQPEEKMIIHLQALLGNRWAAIASYLPQRTDNDIKNYWNTHLKKKLVMMKFQNGIINENKTNLATDISSCNNNNNGCNHNKRTTNKGQWEKKLQTDINMAKQALFQALSLDQPSSLIPPDPDSPKPHHHSTTTYASSTDNISKLLQNWTSSSSSKPNTSSVSNNRSSSPGEGGLFDHHSLFSSNSESGSVDEKLNLMSETSMFKGESKPDIDMEATPTTTTTDDQGSLSLIEKWLFDDQGLVQCDDSQEDLIDVSLEELK

SEQ ID NO: 96 - DNA, 1002 bp, Arabidopsis thaliana
atgggaagaccaccatgctgtgacaagattggagtgaagaaaggaccatggacaccagaggaagatatcatcttggtttcttacatccaagaacatggtcctggaaactggagatctgtgcctactcacacaggtttgaggagatgtagcaaaagctgtagattgaggtggactaattatcttcgacctgggatcaagcgtggaaatttcaccgagcatgaagagaagatgattctccatcttcaagctcttttgggaaacaggtgggcagctatagcatcatatcttccagaaaggacagacaatgatataaagaactattggaacactcatttgaagaaaaagctcaagaagatgaatgattcttgtgatagtactatcaacaatggccttgataataaagacttctccatatcaaacaaaaacactacctcacatcaaagcagcaactccagtaaaggtcaatgggagagaaggcttcagacagatatcaacatggctaaacaagctctttgtgatgccttgtctattgacaaaccacaaaacccaactaatttttctattcccgatcttggttatggtccatcatcttcttcgtcctctaccaccaccaccaccaccaccacgagaaacactaatccatacccatctggggtctatgcttcaagtgctgagaacattgctcgtttgcttcagaattttatgaaagacacaccaaagacctcggtgcccttgccggttgcagccaccgagatggctatcaccacggcagcttcgagccctagcacaaccgaaggagacggagaagggattgaccattctttgttcagcttcaactccatagatgaagctgaagagaagcctaaactaatagaccatgacattaatggtctaattacacaaggctctctttctttgttcgagaaatggctctttgatgagcaaagccacgatatgatcatcaataacatgtcactagagggtcaggaagtgttgttctag

SEQ ID NO: 97 - protein, 333 aa, Arabidopsis thaliana
MGRPPCCDKIGVKKGPWTPEEDIILVSYIQEHGPGNWRSVPTHTGLRRCSKSCRLRWTNYLRPGIKRGNFTEHEEKMILHLQALLGNRWAAIASYLPERTDNDIKNYWNTHLKKKLKKMNDSCDSTINNGLDNKDFSISNKNTTSHQSSNSSKGQWERRLQTDINMAKQALCDALSIDKPQNPTNFSIPDLGYGPSSSSSSTTTTTTTTRNTNPYPSGVYASSAENIARLLQNFMKDTPKTSVPLPVAATEMAITTAASSPSTTEGDGEGIDHSLFSFNSIDEAEEKPKLIDHDINGLITQGSLSLFEKWLFDEQSHDMIINNMSLEGQEVLF

SEQ ID NO: 98 - DNA, 1056 bp, Arabidopsis thaliana
atgggaagaccaccttgctgtgaaaagattggagtgaagaaagggccatggacaccagaggaagacatcatcttggtttcttacatccaagaacatggtcctggaaactggagatctgtcccaacacacacaggtttaagatgtagcaagagctgcagattgagatggactaattatcttcgacccggtattaagcgtggaaattttactgagcatgaagagaagacaattgttcatcttcaagcccttttaggcaacagatgggcagccatagcatcataccttccagaaaggacagacaatgatataaagaactattggaacactcacttgaagaagaagctcaaaaagattaatgaatctggtgaagaagataatgatggtgtctcttcatcaaacactagttcacaaaagaaccatcaaagcactaacaaaggtcaatgggaaagaagacttcagacagacattaacatggcaaaacaagctctttgtgaggccttgtctttagacaaaccatcatccactctttcatcatcttcatcattaccgacaccagtaatcacacaacaaaacatccgtaacttctcatcagctttgcttgaccgttgttatgatccatcctcttcttcttcatctaccacaaccaccactacaagcaacactactaatccatacccatcaggggtatatgcgtcaagtgctgagaacatcgcccggttgcttcaagatttcatgaaagacacacccaaggctttaactttatcatcttcatctccggtttcagagactggaccactcactgctgcagtctcggaagaaggtggagaagggtttgaacaatctttcttcagcttcaattcaatggacgaaactcaaaacttgactcaggagacaagcttcttccatgatcaagtgatcaaaccggaaataacaatggaccaagatcatggtctaatatcacaagggtctctgtctttgtttgagaaatggttatttgatgagcaaagccacgagatggttggtatggcactagcaggacaagaagggatgttctag

SEQ ID NO: 99 - protein, 351 aa, Arabidopsis thaliana
MGRPPCCEKIGVKKGPWTPEEDIILVSYIQEHGPGNWRSVPTHTGLRCSKSCRLRWTNYLRPGIKRGNFTEHEEKTIVHLQALLGNRWAAIASYLPERTDNDIKNYWNTHLKKKLKKINESGEEDNDGVSSSNTSSQKNHQSTNKGQWERRLQTDINMAKQALCEALSLDKPSSTLSSSSSLPTPVITQQNIRNFSSALLDRCYDPSSSSSSTTTTTTSNTTNPYPSGVYASSAENIARLLQDFMKDTPKALTLSSSSPVSETGPLTAAVSEEGGEGFEQSFFSFNSMDETQNLTQETSFFHDQVIKPEITMDQDHGLISQGSLSLFEKWLFDEQSHEMVGMALAGQEGMF

SEQ ID NO: 100 - DNA, 924 bp, Oryza sativa
atggggcggccgccgtgttgcgagaaggagggggtgaagaaggggccatggacgccggaggaggacatggtgctggcgtcgtacgtgcaggagcacggcccgggcaactggcgcgccgtgccgcccaggacgggcctcctccgctgcagcaagagctgccgcctccgctggaccaactacctccgcccgggcatccgccgcggcggcttctcccaccacgaggagcgcctcatcctccacctccaggccctcctcggcaaccgctgggccgccatcgcctcctacctcccccaccgcaccgacaacgacgtcaagaacttctggaacacccacctcaagaagaagctcgccctcacctcctcctcctcctcgccgccgacgccgacgacgccgctcgtcgccagggggcagtgggagcgcaagctgcagaccgacatcgacctcgccaggcgcgccctccgcgacgccctctccgtcgacgacgccgcctccccggcgatgatcagcagcgggccgcccgcgccggcggcggcggcggcgtacgccctgagcgagcgcaacatctccgtgatgctgagcggctgggcggcgccgcctccggccaggaaaggattgtcagcctgcaacccggcggcggcgacgacgacgcccggtggcgccgccgcggagagcgcgtccacggccgggacgtcgttggagctcaccgccgactgctgctccggcggcggcgactccagcgcgtccaactgcctgccgtcgtccatgctcctcgcgtgcgacgacggcgacgcgacggcgacggcggccggggtggcgccgctgtcggcgatcgagtcgtggctgctgctcgacgacagcggagagccgcagctggcactggacgagcagctgctggacgtagctctccgtaattacgctttctaa

SEQ ID NO: 101 - protein, 307 aa, Oryza sativa
MGRPPCCEKEGVKKGPWTPEEDMVLASYVQEHGPGNWRAVPPRTGLLRCSKSCRLRWTNYLRPGIRRGGFSHHEERLILHLQALLGNRWAAIASYLPHRTDNDVKNFWNTHLKKKLALTSSSSSPPTPTTPLVARGQWERKLQTDIDLARRALRDALSVDDAASPAMISSGPPAPAAAAAYALSERNISVMLSGWAAPPPARKGLSACNPAAATTTPGGAAAESASTAGTSLELTADCCSGGGDSSASNCLPSSMLLACDDGDATATAAGVAPLSAIESWLLLDDSGEPQLALDEQLLDVALRNYAF

SEQ ID NO: 102 - DNA, 1025 bp, Oryza sativa
tggtgaggccgccgtgctgcgacaaggacggcgtcaagaagggcccgtggacgccggaggaggacctcgtcctcgtctcctacgtccaggagcacggccccggcaactggcgcgccgtcccgaccagaacagggctgatgcggtgcagcaagagctgtaggctccggtggaccaactacctgaggcccgggatcaagcggggaaacttcaccgaccaggaggagaagctcatcgtccacctccaggcgctcctcggcaaccgctgggcggccatcgcgtcgtacctccccgagcgcacggacaacgacatcaagaactactggaacacccacctcaagcgcaagctgcagggcggcggcgccggcggtgacggagacggtggcgccgccggcgacgcggtctccccgaagcccgccgcgcagaggcccgcgtcgtcgtccaaggggcagtgggagcggcgcctgcagaccgacatcgacatggcgcgccgcgcgctccgcgaggcgctcacgtcgctcgacgacgtcaagccaccgcatcagcccgacgccgccaacgccgccgcggggggaggcggcgccaccaccggagcagcagcgtccgccggcgccgatagccccgccgcgtcgagcacgtcgggggcgtcgcagtgctccccgtcatccgccggctacgtcctcaccaccgagaacatctcccggatgctcgacgggtgggcccggaagaagggcggcggcggcggcaggcgcgccgccggcagcgggccggccacccccggcgccaccgagagcgcgtccggctcgtcggaagcctccgaggtgtcctacggcggcacggccttgtccgcagcggcggcgcccgcgtccgccttcgagtacgagacaaagccgaccgtcaccgccgccgccgccgccgacgccggcgacgagacgcagctctccgccatcgagtcgtggctgttcgccgacgccgacggcatcgagagtggcagcttgctcgacgcggccatggattacaccttctaa

SEQ ID NO: 103 - protein, 341 aa, Oryza sativa
MVRPPCCDKDGVKKGPWTPEEDLVLVSYVQEHGPGNWRAVPTRTGLMRCSKSCRLRWTNYLRPGIKRGNFTDQEEKLIVHLQALLGNRWAAIASYLPERTDNDIKNYWNTHLKRKLQGGGAGGDGDGGAAGDAVSPKPAAQRPASSSKGQWERRLQTDIDMARRALREALTSLDDVKPPHQPDAANAAAGGGGATTGAAASAGADSPAASSTSGASQCSPSSAGYVLTTENISRMLDGWARKKGGGGGRRAAGSGPATPGATESASGSSEASEVSYGGTALSAAAAPASAFEYETKPTVTAAAAADAGDETQLSAIESWLFADADGIESGSLLDAAMDYTF

SEQ ID NO: 104 - DNA, 1230 bp, Oryza sativa
atggccgggggaggcggtagcctggcggtgggcggcggattgaacgggtggcgaggcgtcagcggcagcgtcggagctgcggggctagaggagggtagtgggccggcttggtggcgggggcatctaaccgccaacggctcgaggatgaagaagggggggggttctcgccggcacgctattccaactggcgaggcgggtagcggcgcggtcagtagagtcgccgtggccgtggccgtgtatgtggactcgtcgatcgagcaggagcagttggaggaggtggtgccgtggtggggattgatggggaggccgccgtgctgcgtgaaggcggaggtgaagaaggggccgtggacgccggaggaggacctcatgctcgtcgcctacgtccaggagcacggcccgggcaactggcgcgccgtgcccaccaacaccgggctgatgcggtgcagcaagagctgccggctccggtggaccaactacctccggccggggatcaagcgggggaacttcaccgaccaggaggagaagctcatcgtccacctccaggccctcctcggcaacaggtgggcggcgatcgcgtcctacttgccggagaggacggacaacgacatcaagaactactggaacacgcacctcaagaagaagctcaagaagatgagcgccaccggcggcggcggcgacgacggcgagggaggtggcgccggcgaggtgaagaccagggcggctgcgccgaaggggcagtgggagcggcgcctgcagacggacatccacaccgcgcgccaggcgctccgcgacgcgctctcgctggacccctcgccgccggccaagccgctggactcgtcgtcgggcgccacggcgccgccgtcgtcgcaggcggcgacgtcgtacgcatccagcgccgagaacatcgcgcggctcctggagggctggatgcgccccggcggcggcggcggcaagacgacgacgacgccgtcctccgggtcgaggtcgtcggcggcgtcggtgctgtccggggaggccagccacagcggcggcgccacggcgccgacgcccgacggctcgacggtcaccagcaagacgaaggacgaggagaccgccggcgcgccgccgccgccgccgccgccggcgttctccatgctggagagctggctgctcgacgacggcatgggccacggcgaggtggggctcatggacgtggtggtgccattgggggacccgagtgagttcttttag

SEQ ID NO: 105 - protein, 409 aa, Oryza sativa
MAGGGGSLAVGGGLNGWRGVSGSVGAAGLEEGSGPAWWRGHLTANGSRMKKGGGSRRHAIPTGEAGSGAVSRVAVAVAVYVDSSIEQEQLEEVVPWWGLMGRPPCCVKAEVKKGPWTPEEDLMLVAYVQEHGPGNWRAVPTNTGLMRCSKSCRLRWTNYLRPGIKRGNFTDQEEKLIVHLQALLGNRWAAIASYLPERTDNDIKNYWNTHLKKKLKKMSATGGGGDDGEGGGAGEVKTRAAAPKGQWERRLQTDIHTARQALRDALSLDPSPPAKPLDSSSGATAPPSSQAATSYASSAENIARLLEGWMRPGGGGGKTTTTPSSGSRSSAASVLSGEASHSGGATAPTPDGSTVTSKTKDEETAGAPPPPPPPAFSMLESWLLDDGMGHGEVGLMDVVVPLGDPSEFF

SEQ ID NO: 106 - DNA, 966 bp, Oryza sativa
atggggaggccgccgtgctgcgacaaggtcggggtgaagaaggggccatggacgccggaggaggacctgatgctggtctcctacatccaggagcacggcgccggcaactggcgcgccgtgccgacgaacaccgggctgatgcgttgcagcaagagctgccggctccggtggacgaactacctcaggccggggatcaagcgggggaacttcaccgagcaggaggagaagctcatcgtccacctccaggctctcctcggcaaccggtgggcagcgatagcgtcgtacttgccggagaggacggacaacgacatcaagaactactggaacacgcacctcaagaagaagctcaagaagatgcaggccgccggaggtggggaagacagcggcgccgcctcggagggtggcggcggccgcggcgacggcgacggcggcgggaaaagcgtgaaggccgccgcacctaaggggcagtgggagcggcggctgcagacggacatccacacggcgcggcaggcgctgcgcgacgcgctctcgctcgaccaccccgacccgtcgccggcgacggcggcggcggcggcgacgccagcggggtcgtcggcggcgtacgcgtcgagcgcggacaacatcgcgcggctgctgcagggctggatgcgcccgggcggcggcggcggcggcaacggcaagggccccgaggcgtcggggtcgacctccacgacggcgacgacgcagcagcagccgcagtgctccggcgagggcgcggcatccgcgtccgcgtcggcgagccagagcggcgccgccgccgcggcgactgcccagacgccggagtgctcgacggagacgagcaagatggccaccggcggcggcgccggcggccccgcgccggcgttctcgatgctggagagctggctgctcgacgacggcggcatggggctcatggacgtggtgccattgggggaccccagtttttag

SEQ ID NO: 107 - protein, 321 aa, Oryza sativa
MGRPPCCDKVGVKKGPWTPEEDLMLVSYIQEHGAGNWRAVPTNTGLMRCSKSCRLRWTNYLRPGIKRGNFTEQEEKLIVHLQALLGNRWAAIASYLPERTDNDIKNYWNTHLKKKLKKMQAAGGGEDSGAASEGGGGRGDGDGGGKSVKAAAPKGQWERRLQTDIHTARQALRDALSLDHPDPSPATAAAAATPAGSSAAYASSADNIARLLQGWMRPGGGGGGNGKGPEASGSTSTTATTQQQPQCSGEGAASASASASQSGAAAAATAQTPECSTETSKMATGGGAGGPAPAFSMLESWLLDDGGMGLMDVVPLGDPSF

SEQ ID NO: 108 - DNA, 927 bp, Oryza sativa
atgggacggccgccgtgctgcgacaaggaggggatcaagaaggggccatggacgcccgaggaggacatcatcctcgtctcctacatccaagaacacggccccggcaactggagatcggttcccatcaacacagggctgatgaggtgcagcaagagctgcaggctgcggtggacgaactacctgcggccggggataaagcgcggcaacttcacggcgcacgaggaggggatcatcgtccacctccagtcgctgctcggcaaccgctgggccgccatcgcctcctacctcccccagcgcaccgacaacgacatcaagaactactggaacacccacctcaagaagaagctcgccgccgccgccaactccacttcagcagcctccaaccgccaccccatcttcgccgacgccaccttcccctccgccgccggcagccacacggtgagcagcaactccgatgtcaaccagatggcagccattgctaggcgctcccccttcgccgactgcccatcctcctcctacgcctccagcatggacaacatctccaagctgctcgacggcttcatgaagaccaactcgccgtcgccgccgccgccgccgctgcagcactatgacggcggctattacgacgacgtcaagcccgccgtcgatgtcgtcggcaaccccttgctgtcgtccttcgactgcatgtccggcgccgacctggactgctgcttcgacgttcatcagcagcagccggcgtcgtcgttcatggagtacggcggctatggcggcggctacggcgacgagagcaagcagcagctgatgaaccaggcggcggcgccgctgtcttcgattgagaagtggctgttcgacgaggcggcggcggagcaggttgccgacctcatggacctctccgatggttgctgctccgtcccaatgatgttttaa

SEQ ID NO: 109 - protein, 308 aa, Oryza sativa
MGRPPCCDKEGIKKGPWTPEEDIILVSYIQEHGPGNWRSVPINTGLMRCSKSCRLRWTNYLRPGIKRGNFTAHEEGIIVHLQSLLGNRWAAIASYLPQRTDNDIKNYWNTHLKKKLAAAANSTSAASNRHPIFADATFPSAAGSHTVSSNSDVNQMAAIARRSPFADCPSSSYASSMDNISKLLDGFMKTNSPSPPPPPLQHYDGGYYDDVKPAVDVVGNPLLSSFDCMSGADLDCCFDVHQQQPASSFMEYGGYGGGYGDESKQQLMNQAAAPLSSIEKWLFDEAAAEQVADLMDLSDGCCSVPMMF

SEQ ID NO: 110 - DNA, 936 bp, Oryza sativa
atgggccggccgccgtgctgcgacaaggaggggatcaagaaggggccatggacgcccgaggaggacatcatcctcgtctcctacatccaagaacacggccccggcaactggagatcggttcccatcaacactgggctgatgaggtgcagcaagagctgcaggctgcggtggacgaactacctgcggccggggataaagcgcggcaacttcacggcgcacgaggaggggatcatcgtccacctccagtcgcttctcggcaaccgctgggccgccatcgcctcctacctcccccagcgcaccgacaacgacatcaagaactactggaacacccacctcaagaagaagctcgccgccgccgccaactccacttcatcctccaaccgccaccccatcttcgccgacgccaccttcccctccgccgccggcggtagctacacggtgagcagcaactccgatgtcacccagatggcagccattgctaggcgctcccccttcgccgactgcccatcctcctcatacgcctccagcatggacaacatctccaagctgctcgacggcttcatgaagaccaactccccgtcgccgccgccgccaccgctgcagcactatgacagcggctattacgacgacgtcaagcccgccgtcgatgtcggcggcaaccccttgctgtcgtccttcgactgcatgtccggcgccgacctggactgctgcttcgacgttcatcagcagcaccagcagcagcagccggcgtcgttcatggagtacggcggctatggcggcggctacggcgacgagagcaagcagcagctgatgaaccaggcagcgccgccgctgtcatcgatcgagaagtggctgttcgacgaggcggcggcggagcaggtcgccgacctcatggacctctccgacggttgctgctccgtcccaatgatgttttaa

SEQ ID NO: 111 - protein, 311 aa, Oryza sativa
MGRPPCCDKEGIKKGPWTPEEDIILVSYIQEHGPGNWRSVPINTGLMRCSKSCRLRWTNYLRPGIKRGNFTAHEEGIIVHLQSLLGNRWAAIASYLPQRTDNDIKNYWNTHLKKKLAAAANSTSSSNRHPIFADATFPSAAGGSYTVSSNSDVTQMAAIARRSPFADCPSSSYASSMDNISKLLDGFMKTNSPSPPPPPLQHYDSGYYDDVKPAVDVGGNPLLSSFDCMSGADLDCCFDVHQQHQQQQPASFMEYGGYGGGYGDESKQQLMNQAAPPLSSIEKWLFDEAAAEQVADLMDLSDGCCSVPMMF

SEQ ID NO: 112 - DNA, 969 bp, Populus trichocarpa
atgggcagaccaccttgctgtgataagataggagtgaaaaaaggaccatggactcctgaggaagatatcatcttggtatcatatattcaagaacatggtcctgggaattggagagctgtgccaactagtacaggactgcttagatgcagtaagagttgcagattgagatggactaattacctaaggccagggatcaaacgtggtaattttaccgatcacgaggagaagatgataatccacctccaagcccttctaggcaacagatgggctgccatagcttcatacctccctcagagaacagataatgacattaaaaacttttggaacacacatttgaagaagaagttgagaaagcttcaagcagggcaagaaggtcagtctagagatgggttatcatcaacaggttcacagcaaatttctagaggccaatgggagagaaggcttcaaactgatatcaacatggctaggcaagccctatgcgaggccttgtctcccggtaaaccaagcagcttgttaaccgggttgaaaccctcttgtgggtatgaaaaaccagctacagaaccaatctatgcatcaagcactgaaaatatatccagattgctcaaaggatggatgataagtgggcctaagcagtcgctaaaaaattcaactactcagaattccttcatcgatacggctggagctgattcactgtctagtgaagggactcctgataaagcagacaaaaatggcactggattatcacaggcatttgaatcactctttggttttgactctttcgactcttcaaattcagatttctctcaatccatgtcgcctgatactggccttttccaagacgaaagtaagccaaattccagtgctcaagtgccactgtcattgattgagaggtggctatttgatgaaggagccatgcaagggaaagattacataaacgaagtcacaatagatgaagataatctcttctag

SEQ ID NO: 113 - protein, 322 aa, Populus trichocarpa
MGRPPCCDKIGVKKGPWTPEEDIILVSYIQEHGPGNWRAVPTSTGLLRCSKSCRLRWTNYLRPGIKRGNFTDHEEKMIIHLQALLGNRWAAIASYLPQRTDNDIKNFWNTHLKKKLRKLQAGQEGQSRDGLSSTGSQQISRGQWERRLQTDINMARQALCEALSPGKPSSLLTGLKPSCGYEKPATEPIYASSTENISRLLKGWMISGPKQSLKNSTTQNSFIDTAGADSLSSEGTPDKADKNGTGLSQAFESLFGFDSFDSSNSDFSQSMSPDTGLFQDESKPNSSAQVPLSLIERWLFDEGAMQGKDYINEVTIDEDNLF

SEQ ID NO: 114 - DNA, 909 bp, Zea mays
atggggaggccgccgtgctgcgacaagatgggggtgaagaaaggcccgtggacccccgaggaggacctcatgctcgtctcctatgtccaggagcacggccccgggaactggcgcgccgtgccgaccaacaccgggctgatgcggtgcagcaagagctgcaggttgcggtggacaaactacctccggccgggaatcaagcgcggcaactttaccgagcaggaggagaagctcatcgtccacctccaggctctccttggcaacaggtgggcggccatagcatcctacttgccgaagaggacggacaacgatatcaagaactactggaacacgcatcttaagaagaagctgaagaacatgcagggcggcgaagggggcgcgggagggaagcgcccggccgttcccaaggggcagtgggagcggcggctgcagactgacatccacacggcgcggcaggctctgcgcgacgcgctctcactggagccttcggcgacgccgctggccaaggtggagcctctgccgacggctccggggtgcgcgacgtacgcgtctagcgccgacaacatcgcgcggctgctggaggggtggctgcgcccgggcagcggcaaggggccggaggcgtcgggttcgacgtcgacgacggccacgacgcgccagcggccgcagtgctccggtgagggcacggcgtctgcgtcggcgagccacagtggcggggcggccgcgaacacggcggcgcagacccccgagtgctcgacggagaccagtaagatggccggcagctcggtcggcgcgggctccgcgccggcgttctcgatgctggagagatggctgctggacgacggcatggggcacgctgaggtggggctcatgaccgacgtggtgccattaggggaccccagtgagttcttttaa

SEQ ID NO: 115 - protein, 302 aa, Zea mays
MGRPPCCDKMGVKKGPWTPEEDLMLVSYVQEHGPGNWRAVPTNTGLMRCSKSCRLRWTNYLRPGIKRGNFTEQEEKLIVHLQALLGNRWAAIASYLPKRTDNDIKNYWNTHLKKKLKNMQGGEGGAGGKRPAVPKGQWERRLQTDIHTARQALRDALSLEPSATPLAKVEPLPTAPGCATYASSADNIARLLEGWLRPGSGKGPEASGSTSTTATTRQRPQCSGEGTASASASHSGGAAANTAAQTPECSTETSKMAGSSVGAGSAPAFSMLERWLLDDGMGHAEVGLMTDVVPLGDPSEFF

SEQ ID NO: 116 - DNA, 54 bp, Artificial sequence
  primer 1
ggggaccactttgtacaagaaagctgggtccatgtgattaaagcaaactcttca

SEQ ID NO: 117 - DNA, 54 bp, Artificial sequence; identical to SEQ ID NO: 116
  primer 2

SEQ ID NO: 118 - DNA, 1179 bp, Oryza sativa
ttgcagttgtgaccaagtaagctgagcatgcccttaacttcacctagaaaaaagtatacttggcttaactgctagtaagacatttcagaactgagactggtgtacgcatttcatgcaagccattaccactttacctgacattttggacagagattagaaatagtttcgtactacctgcaagttgcaacttgaaaagtgaaatttgttccttgctaatatattggcgtgtaattcttttatgcgttagcgtaaaaagttgaaatttgggtcaagttactggtcagattaaccagtaactggttaaagttgaaagatggtcttttagtaatggagggagtactacactatcctcagctgatttaaatcttattccgtcggtggtgatttcgtcaatctcccaacttagtttttcaatatattcataggatagagtgtgcatatgtgtgtttatagggatgagtctacgcgccttatgaacacctacttttgtactgtatttgtcaatgaaaagaaaatcttaccaatgctgcgatgctgacaccaagaagaggcgatgaaaagtgcaacggatatcgtgccacgtcggttgccaagtcagcacagacccaatgggcctttcctacgtgtctcggccacagccagtcgtttaccgcacgttcacatgggcacgaactcgcgtcatcttcccacgcaaaacgacagatctgccctatctggtcccacccatcagtggcccacacctcccatgctgcattatttgcgactcccatcccgtcctccacgcccaaacaccgcacacgggtcgcgatagccacgacccaatcacacaacgccacgtcaccatatgttacgggcagccatgcgcagaagatcccgcgacgtcgctgtcccccgtgtcggttacgaaaaaatatcccaccacgtgtcgctttcacaggacaatatctcgaaggaaaaaaatcgtagcggaaaatccgaggcacgagctgcgattggctgggaggcgtccagcgtggtggggggcccacccccttatccttagcccgtggcgctcctcgctcctcgggtccgtgtataaataccctccggaactcactcttgctggtcaccaacacgaagtaaaaggacaccagaaacatagtacacttgagctcactccaaactcaaacactcacacca

SEQ ID NO: 119 - protein, 16 aa, Artificial sequence
  motif 1
  VARIANT (7)..(7): / replace = "Phe"
  VARIANT (14)..(14): / replace = "Glu"
  UNSURE (15)..(15): Unknown amino acid
  VARIANT (16)..(16): / replace = "Gly"
QGSLSLIEKWLFDDXS

SEQ ID NO: 120 - protein, 11 aa, Artificial sequence
  motif 2
  VARIANT (3)..(3): / replace = "Ser"
  VARIANT (4)..(4): / replace = "Lys"
  VARIANT (5)..(5): / replace = "Met"
  UNSURE (7)..(7): Unknown amino acid
  VARIANT (9)..(9): / replace = "Phe"
NIARLLXGWMK

SEQ ID NO: 121 - protein, 6 aa, Artificial sequence
  motif 3
  UNSURE (5)..(5): Unknown amino acid
  VARIANT (6)..(6): / replace = "Asp"
YASSXE

SEQ ID NO: 122 - DNA, 861 bp, Solanum lycopersicum
atgagtagtgaaaaagaagatggtttaggtttgagtttgagcttaggaatcatgagttgccctcagaataatcataaaactacaccttctttacctttgaatctcttgcctttcatgcatcatcatcaagtttcttcagggagaaaagatgaaggtggagaaagggtaagagggggaatagatatgaatgaaccagcgaggatgataatagagtgtgatgatgaagaagatgaagaagaagatcaggtgttaatggtttcctcacctaacagcactgtttctagtgtgagtggaaagaggagtcatgacagagaagagaacgaaggggaaagggccaccagctcactggaggacgacggcggagatgcggcggcaaggaagaaactccggttgtctaaggagcaagctgccgttcttgaagagacattcaaggagcataacacacttaatccgaagcaaaaattggctctgtcaaaacagctgaatctcaggccaagacaagtggaggtgtggtttcagaacagaagggcaaggactaagttggagcaaaccgaagttgattgtgagtatttgaagcgttgctgcgaaaatctaacggatgaaaaccgacgtttgcagaaagaagttagtgagcttagagcattgaaactttctccacagttttacatgaacatgagccctccaacaacccttacaatgtgccctcaatgcgagcgcgtagctgtatcatcttcttcgtcctcatcgtcagtagtcaacgccactcgcgctcagaaccaccaagcgccggtgcctatgaacaagccatgggctgcaatgttcgcttctaaaacactggatgtgcagaggtcacaaatgtaa

SEQ ID NO: 123 - protein, 286 aa, Solanum lycopersicum
MSSEKEDGLGLSLSLGIMSCPQNNHKTTPSLPLNLLPFMHHHQVSSGRKDEGGERVRGGIDMNEPARMIIECDDEEDEEEDQVLMVSSPNSTVSSVSGKRSHDREENEGERATSSLEDDGGDAAARKKLRLSKEQAAVLEETFKEHNTLNPKQKLALSKQLNLRPRQVEVWFQNRRARTKLEQTEVDCEYLKRCCENLTDENRRLQKEVSELRALKLSPQFYMNMSPPTTLTMCPQCERVAVSSSSSSSSVVNATRAQNHQAPVPMNKPWAAMFASKTLDVQRSQM

SEQ ID NO: 124 - protein, 6 aa, Artificial sequence
  motif 1
  VARIANT (1)..(1): / replace = "Ser"
  VARIANT (2)..(2): / replace = "Arg"
RKKLRL

SEQ ID NO: 125 - protein, 24 aa, Artificial sequence
  motif 2
  VARIANT (17)..(17): / replace = "Glu"
RQVEVWFQNRRARTKLKQTEVDCE

SEQ ID NO: 126 - protein, 10 aa, Artificial sequence
  motif 3
  UNSURE (3)..(3): Xaa can be any amino acid, preferably one of Ala, Leu, Ile, or Thr
  VARIANT (6)..(6): / replace = "Pro"
  VARIANT (7)..(7): / replace = "Gln"
  VARIANT (9)..(9): / replace = "Lys" / replace = "Arg"
  VARIANT (10)..(10): / replace = "His"
TLXMCLSCER

SEQ ID NO: 127 - protein, 5 aa, Artificial sequence
  motif 4
  VARIANT (5)..(5): / replace = "Ala"
SPNST

SEQ ID NO: 128 - protein, 3 aa, Artificial sequence
  motif 5
LGL

SEQ ID NO: 129 - protein, 3 aa, Artificial sequence
  motif 6
  VARIANT (1)..(1): / replace = "Asp"
  VARIANT (2)..(2): / replace = "Asp"
  VARIANT (3)..(3): / replace = "Asp"
EEE

SEQ ID NO: 130 - protein, 5 aa, Artificial sequence
  motif 7
  VARIANT (1)..(1): / replace = "Gln" / replace = "Asp"
  VARIANT (3)..(3): / replace = "Lys"
ENRRL

SEQ ID NO: 131 - DNA, 2194 bp, Oryza sativa; identical to SEQ ID NO: 61

SEQ ID NO: 132 - DNA, 58 bp, Artificial sequence
  primer: prm10162
ggggacaagtttgtacaaaaaagcaggcttaaacaatgagtagtgaaaaagaagatgg

SEQ ID NO: 133 - DNA, 50 bp, Artificial sequence
  primer: prm10163
ggggaccactttgtacaagaaagctgggtacggatccatatttatctttc

SEQ ID NO: 134 - DNA, 1007 bp, Populus trichocarpa
tcggctcactggtgttcgagaggagtgaagatgggtgataaaaatgatggactgggcttgagtttgagcttgggattcgatgctacacaacaaaatcatcaacagcagccttctttgaagctaaatctcatgcccgtaccttcacaaaacaatcatagaaaaacttccttgactgacctctttcaatcatcagatagagcatgtggtacgaggttttttcaacgaggaattgacatgaacagggtgccagctgcagtgacagattgtgatgacgaaactggggtttcttcaccaaacagtacgctatccagcttaagtggtaaaagaagcgaaagagaacagattggagaagaaacagaagcggagagggcctcttgctctcgtgacagtgatgatgaagatggtgctggtggtgatgcttctaggaagaagctgagactctcaaaggaacagtctttagtgcttgaagagactttcaaggaacataatactcttaatcccaaggagaagctggccttggcaaagcagttgaatctcaggcctaggcaagtggaggtgtggtttcagaaccgaagagcaaggactaagttgaagcaaactgaagtcgattgcgagtacctaaagaggtgctgtgaaaatctaacagaggagaacaggaggttacagaaggaggtgcaagagcttagagcactgaaactttcccctcagctctacatgcacatgaaccctcccaccaccctcaccatgtgcccttcatgcgagcgagttgctgtctcgtcagcctcatcatcttctgctgctgccgcgtcctctgctcttgctccaactgcctcaacccgccaaccacaacgacccgtgcccattaacccttgggcaacaatgcccgtccaccaacgaacttttgatgctcctgcttccaggtcatgattgttagcttgaagtaggggctatttggtaaagataaaatggatgaaaggatttaggataagatttccaggcatccacag

SEQ ID NO: 135 - DNA, 1040 bp, Populus trichocarpa
tttgttgtttgagagggagagagagagaagatgggtgataaaaatgatggcttgggcttgagtttgagcttgggatatgctacacaacggaatcatcatcagcagccttctttgaagctaaatctcatgcctttggcttcacaaaacaaacataagaaaacttcctggactgacctctttcaatcaccagatagaacatgtgatacgaggttgtttcaacgagggattgacatgaacagggtaccggctgctgtggcagattgtgatgacgaaactggggtttcttcaccgaacagtacactatccagcttgatcagtggtaaaagaagcgaaagagaacagattggtgaagaaacagaagcagagagagcctcttgctctcgcggaagtgatgatgaagatggtggtgatgcttctaggaagaagctgagactgtcaaaggaacagtcgtcagtgcttgaagagaatttcaaggaacataatactctcaatcccgtgagcagtagcctttggtacgtggtggttttgtggttgcagaaggaaaagctggctttggcaaaacagttgaatctcaggccaaggcaagtggaggtgtggtttcagaacagaagagcaaggactaagttgaagcaaactgaagtagattgcgagtacctaaagacgtgctgtgaaaatctaacagaggagaacaggaggttactgaaggaggtgcaagagctcagagcactgaaactctccccacagctctacatgcacatgaaccctcccaccaccctcaccatgtgtccttcatgcaagcgtgttgtctcatcggcatcatcatcttctgctgctgtcgtgtcctctgctcttgctccaattgcctcgaccccccaaccacaacgaccggtgcccattaacccttgggcagcaatgcctatccaccatcgaacttttgatgctcccgcttctagttcatgatagtttgtttgaagtagggctattattgtaagaagataaaatggatggaagtaattaggataaaatatccagagaaacgt

SEQ ID NO: 136 - DNA, 1019 bp, Populus trichocarpa
ttctggtttttttgttggcaaaggaagaagatgatggctgggaaggaagatttgggtttgagtttaagtcttagtgttcctcaaaatcaacattctctgcagttgaatctcatgccttcactggttccatcgactgcttcttcttctctctctgggttccatcctcaaaaaccctcatggaatgtgaccttcccttcttcagatccaaactctaattcataccgggccgagacaagatcgttgcttcgaggaatcgacgtgaacaggttaccatcaacggctgattgtgaagaggaagcgggggtttcatctccaaacagcacgatatcgagtattagtgggaagagaagtgaaagagaaggtattaatggagatgagcatgagatggagagagcttcttctcatggaatcagtgatgaagaagatggtgaaacctcaagaaagaagctcaggctgtctaaagatcaggccgctattcttgaagagagcttcaaagaacacaacactctcaacccgaagcaaaagatggctttggctaagcagttaggactcagacctagacaagtggaggtgtggtttcagaacaggagggcaagaaccaagctgaagcaaaccgaggttgactgtgagttcttgaagagatgctgcgagaacttgacagaagagaacaggaggttgcaaaaggaggttcaggagcttagagctctcaaactttcaccacagttctacatgcaaatgaccccaccaaccaccctcaccatgtgcccatcatgtgagcgtgttgcagccccccccaccgcatcatccaccgttgatgccaggccccatccccatatcggtcctacccgtcataggcccgtccccatgaacccatgggctccggctgctccagtcacacgtggaccaacaccgtttgatgccatccgtcctcgatcgtaattacaacacgaaaccacaggcatcccggtcacttgattcatcactatcttcgctgatttgggaagaaaggtagctggtaa

SEQ ID NO: 137 - DNA, 1311 bp, Solanum lycopersicum
gatcctacaaactgtatttgcactagccaaaggaaaaaagctgtaactcttctgctacaaaagggaacaccccatttctcttcgttctgtcccctcttcctcccttaccccacccccaccaccatttcaaaccccatagcaagaaaaccaccattttctttcttctcttctaaaaaaggggaagaaagaagaaaaaaatagtggaattttttggttttctcagaggaggaaaaaaacagagcaagaaagatgagtagtgaaaaagaagatggtttaggtttgagtttgagcttaggaatcatgagttgccctcagaataatcataaaactacaccttctttacctttgaatctcttgcctttcatgcatcatcatcaagtttcttcagggagaaaagatgaaggtggagaaagggtaagagggggaatagatatgaatgaaccagcgaggatgataatagagtgtgatgatgaagaagatgaagaagaagatcaggtgttaatggtttcctcacctaacagcactgtttctagtgtgagtggaaagaggagtcatgacagagaagagaacgaaggggaaagggccaccagctcactggaggacgacggcggagatgcggcggcaaggaagaaactccggttgtctaaggagcaagctgccgttcttgaagagacattcaaggagcataacacacttaatccgaagcaaaaattggctctgtcaaaacagctgaatctcaggccaagacaagtggaggtgtggtttcagaacagaagggcaaggactaagttgaagcaaaccgaagttgattgtgagtatttgaagcgttgctgcgaaaatctaacggatgaaaaccgacgtttgcagaaagaagttagtgagcttagagcattgaaactttctccacagttttacatgaacatgagccctccaacaacccttacaatgtgccctcaatgcgagcgcgtagctgtatcatcttcttcgtcctcatcgtcagtagtcaacgccactcgcgctcagaaccaccaagcgccggtgcctatgaacaagccatgggctgcaatgttcgcttctaaaacactggatgtgcagaggtcacaaatgtaacttcagtattgtgttgggtagaggaagtgtttatagagcaaggagatgatttacaagagatgtgttgggttgggttttgagaggaacagtttgttgaatttgttcattttatttgtgtaggaaaatggtttttacttgtatggtaagagacataattgtgtttactaaactatttttattattatattatatagtattagc

SEQ ID NO: 138 - DNA, 1000 bp, Solanum lycopersicum
  misc_feature (66)..(66): n is a, c, g, or t
tctctaaatcaacaactccccatcatttctcctcatctttcttacctgaaaaaaataaataaattncttttcacatcactgctcttttttttagctctatttttcttcaagaaatctaaaaaaaagcaaacaaaaatgatggttgaaaaagaagatttggggttaagccttagccttagttttccagataacaataataataacaagaagaagaatactcagctcaatctttcacctttcaatctcattcaaaaaacttcttggactgattccttattcccttcttcagatcggaacattgagacatgtagagtggagaccaggacttttttgaaggggatagatgtgaatcggctgccggcgacgggagacgccaacaaggaagccggcgtttcgtcgccgaacagtacgatttcgagtgtgagtggaaataagagaagtgaaagagaagcaaataattgtgatcaagaggaacatgaaatggaaagaggtggttctgatgaagaagatggagaaacttctagaaagaaattaaggctatcaaaagaccaatctgccattcttgaagaaagtttcaaagaacacaacacactcaatccaaaacaaaagctggctttggctaaaagactgggattgaggcctaggcaagttgaggtgtggtttcagaataggagggcaaggacaaagttgaagcaaacagaagttgactgtgagtttttgaaaagatgttgtgagaatttgacagaggaaaacaggagattacaaaaagaagttcaagagttgagggcattaaagctttcacctcaattctacatgcaaatgacccctcccaccaccctcaccatgtgcccttcatgtgagcgtgtcgcgggcccaccgccatcctcatctgggcccacatccacaccaatgggccaggcccaacccaggcccatgccatttaacctatgggccaatgcactacatccgagatcatgattttgcaagaagggcgatttgg

SEQ ID NO: 139 - DNA, 1170 bp, Zea mays
ccctttgggggcccctttttacaaaaaaaagggggtggggaaaattggggccccccggggggatttttaagggggccccccccttttttttttttttttttttttttttttttttttttttttttttttttttttttttttttttttttttttttttttttttttttttttttttttttttttttttaacaactgaaaccttatatatgcaaagtagtagtaagacaattttgcatcacttatgagtacaaagacataagacatcgttatctatttttcagcaaataaaacactgccaaacaacgaagatttttatcatatcggactaataaacactactaagctgtaatagcctgcgagtataataagaaccaaacaaagaaaaaaagaagatccagccctaattagcactagctacttagctagcggtagcgattagcaagcgcatccatctcatgccatatcgtggtcgtggatcacggcctccgggctgggccgtcgacgaacacggggagagggccccagcagggccctgcacggcccgcctggtcggcggacgcggacgcggaggcgaggcgctcgcaggaggggcacatggtgagcgtggtgggcggcggcatgcgcgcgtagtggtgcggcgccacgagcttgagcgcgcgcagctccgcaacctcccgctgcagccgccggttctcctccgtcagcgtctcgcagcagcgcttcaggaactcgcagtccacctccgtctgcttcagcttcgtcctggctctgcggttctggaaccacacctccacctgacgcggcttcaggttcagctgcttcgccagcgccgccttctgcttggggttgagtgtgttatgctccttgaagctctcctcgaggacggcggcctggtccttggacaggcggagcttcttgcgcgacccaccgccggagtcctcgtcgtcgctgccgcctccggctctcggggtgtggtcggccacctctccgccgctcctcgccggcgctgcgcgcttcccgctgaggctgctggagagcgtgctgtttggtgacgacgacgcgccgccaggctcctcgtcgtcctcgctgcagctacccctcctggtatccccggcaggggcccggttcacgtccaccccccgcaggaacggcatctcgtggccgtggcgc

SEQ ID NO: 140 - DNA, 1145 bp, Populus trichocarpa
gttggaagctcatctttagtgttccaaaatatggagctggccttgagtctaggtgatacatcaaagcctttcaagtttcttgacaaaaccccaaagttatcaagcaaagatcttgggttttgcatgggcttagggagtggttttcctgcaacaacaagatcacaagacaaactaggtagccatgaaagtaactatcaagacgatgaaagaagggtatcatcagatccgccacttcaacttgatcttttgcccttctctcctgttcctcgtggacatcaggctccttccaggattcgctttccatggctgacagataacttggtgtccgaacctggttcaaccgaagcaccagggagaaggtttgatgtgaaccggttgtccatggatgatgctgatgaaggagcggcgatttcgtcgccaaatagtgcagcgtcgtcctttcaaatggattttgggattagaagtgggagagaccgtaagagagatttagatgctattgatgctgagagagcaagttcaagagcaagtgatgatgacgagaacggtttgacaaggaagaaactaaggctctctaaagaacaatcagcttttcttgaagagagcttcaaagagcacaataccctcaatcctaagcaaaagctagctttagcaaagcagttgaatcttcgtcctcgccaagtggaagtgtggtttcagaatcgaagggcaaggacaaaattgaagcagacagaagtagattgtgagtatttaaagaggtgctgtgagacattgacagaagagaacaggaggttacaaaaggaactgcaagaattaagagctttgaaaacttcacaacctttctacatgcagcttcctgccaccactctcaccatgtgtccttcatgtgagcgcgtggccaccaccaccacttcctcttcgggcaccaccaccaccaccaccaccaccaacccatccaccaccaccaccactagcaccaccagctctaaaccattgtcactacctgcaaagcctcggttatttcctttgtcacatggccaggtccaacctcaccatgctgcttcatgactcactatgactaattttttgaaaaagaacacaaaatgaaagactgggatagagtttttccccccttccccgtgtgtaaa

SEQ ID NO: 141 - DNA, 1091 bp, Populus trichocarpa
accgttgcaaccccatctgtgttccaaaatatggagctagctttgagtttaggtgatacttccaagcctttcaagtttcttgacaaaactccaaagttgtcaagcaaagatctcgggttttgcatgggcttagggagtggttttactgcatcaacaagatcgcacgacaaactaggtagccatgaaaataatcatcaagaagatgagcgaagagtctcttcagatccgccacttcaacttgttcttttacctttctctcctgttcctcgcaggcatcagcctccttcaaagactcgctttccatggctgacagataacttggtgtctgaaccgggctcaactgaaggatcagggagagggtttgatgtgaaccgtttgtccatggatgacgctgatgaaggagcggcgctttcgtcgccaaatagcgcggcctcgtcctttcaaatggattttgggattagaagtgggagaggcaataagagagatttagaggctatagaggcttcaagagcaagtgatgatgaagagaacggtttgacaaggaagaaactaaggctctctaaagatcaatcagcttttcttgaagagagtttcaaagaacacagtacccttaatcctaagcaaaagctagctttagcaaagcagttgaatcttcgtcctcgccaagtggaagtgtggtttcaaaacagaagggcaaggacaaaattgaagcagacagaggtagattgtgagtatttaaagagatgctgcgagacactgacaaaagagaacaggaggttacaaaaggaactgcaagaattaagagctttgaaaacttcgcaacccttctacatgcagcttcctgccaccactctcaccatgtgcccttcttgtgagcgcgtggccaccaccacaaccaccaccaatccatccactagcaccaccacctcgaaaacattgtcactgcctgctaaacctaggttatttccttcgtcacatggccaagtccaagctcatcaagctgcttcatgactcaccatgactagtaaaaaaaaaaaacaaaatgaaagacaggaggaacagtgatctccctttcccatttgtaaatagct

SEQ ID NO: 142 - DNA, 1341 bp, Arabidopsis thaliana
ccacaaccccatatctctttgtctgaaaaaactcttttgcatatataaataaatataagccatatcttttgaaactgtacgctgcacaagtgtagaggcagtggcacaacatctttaagaaagagagagagaaagagtcatttattcatttcctcgcttaaaatcttgagcacccagacagaattcttctttcttctttctggggttgagaaaaatgagtgaaagagatgatggattgggctaagtttgagcttgagtttaggttttaatcaaaaggacccgtcttcgaggttaaatccaatgcctctggcttcttatgctcttcatcacacatgcagcatatgcagcagagcaattataaccatcctcaaaagattcagaacacttggattaacatgttcagtcatcagagagaaactcggacatgagatcgtttctccggggaatagacgtgaacagagctccatcgacggtggtggtgacgtggaggatgaaggcgccggagtttcgtctccgaacagcaccgtctcaagcgtgatgagcgggaagaagagcgagcggagctaatggctgcggcaggtgcagttggaggaggtagagtagaagataatgagattgagagagcttcttgctcgctcggggtggtagcgacgatgaagacggtagcgggaacggagatgacagttcgaggaagaaactccgattgtctaaagaacaagcttggttcttgaagaaacttttaaagaacatagtacactcaatccgaagcaaaagatggctttggctaagcaattgaatctaggacgagacaagttgaagtgtggttccaaaaccgaagggcaaggacgaagctgaagcaaacggaagtagactgtgaatacttaagagatgttgcgagaatctaacggatgagaatcggagattgcaaaaggaagtgagtgagcttagggctttaaagcttctccacacttatacatgcacatgaaacctcccactactctcacaatgtgtccttcttgcgagcgagtcgctgttacgtctcttcgtcatcggtggctcctcctgtgatgaattcatcgtctccgatgggtccgatgagtccgtgggctgccatgcctctcggcaacgacctgctgctggttctcattagagtttaattagtctaaagataataggtttggtgatttgtttttattatatgttgaacggacttggaagttcttttcaagagttggtcccatgctcttctttcctttgttttattcagtttctatttatagtgaattctggataatggaaaatctactaatattattgtccaattattagtttggggaaaga

SEQ ID NO: 143 - DNA, 1153 bp, Arabidopsis thaliana
tgcccccagctagtcacatactcatgattgcaaaatctctctctctctctgcctctctatatattaacctttcttcttccttactttctcatcttctatctctcaaaagaaaagcagacaactttatttgcaaaaacagagtttttttttcttatcttgaaaagttcaacagaagatgatgttcgagaaagacgatctgggtctaagcttaggcttgaattttccaaagaaacagatcaactcaaatcaaatccatctgtttctgttactccttcttcttcttcttttggattattcagaagatcttcatggaacgagagtttacttcttcagttccaaactcagattcgtcacaaaaagaaacaagaactttcatccgaggaatcgacgtgaacagaccccgtctacagcggaatacggcgacgaagacgctggagtatcttcacctaacagtacagtctcaagctctacagggaaaagagcgagagagaagaagacacagatccacaaggctcaagaggaatcagtgacgatgaagatggtgataactccaggaaaaacttagactttccaaagatcaatctgctattcttgaagagaccttcaaagatcacagtactctcaatccgaagcagaagcagcattggctaaacaattagggttacgagcaagacaagtggaagtttggtttcagaacagacgagcaagaacaaagctgaacaaacggaggtagactgcgagttcttacggagatgctgcgagaatctaacggaagagaaccgtcggctacaaaaagaagtacggaattgagagcacttaagctctctcctcagttctacatgcacatgagcccacccactactttgaccatgtgcccttctgtgaacacgtgtcggtcccgccaccacaacctcaggctgctacgtcagcgcaccaccggtcgttgccggtcaatgcgtggctcctgcgacgaggatatctcacggcttgacttttgacgctcttcgtcctaggtcctaagtctttttacttgcaaccaagggcattttggtcgttttttaagtttcatggaccagatatgcatgtagttgttaacatgtatgtattttcttagaaagaagaaaaacagattaatatttttctagcttaaacc

SEQ ID NO: 144 - DNA, 1269 bp, Arabidopsis thaliana
aataatgatggattgtaattagccacctgacaaaatctctcatcattcaaagtactatattaatcccctctcttcttcataccatctcacatctctctctatttctcttccacaaagagtcctaacttcgagttgaaacaaacaccatttctcatctctactcagaaagaacaaaccatttcgtgttctttctttctctattctcataaggaaatataattcctgaaactgttgagttctgtgaaaggaaataaaaaacatgatgatgggcaaagaagatctaggtttgagcctaagcttagggttttcacaaaatcacatcctcttcagatgaatctgaatcctaactcttcattatcaaacaatctccagagactcccatggaaccaaacattcgatctacatcagatcttcgcaagatagacgtgaacagttttccatcaacggttaactgcgaggaagacacaggagtttcgtcacaaacagtacgatctcaagcaccattagcgggaagagaagtgagagagaaggaatctccggaaccggcgttggctccggcgcgatcacgacgagatcactccggatcgagggtactcacgtggaacctcagatgaagaagaagacgggggcgaaacgtcgagaagaagctcaggttatcaaaagatcagtctgcttttctcgaagagactttcaaagaacacaacactctcaatcccaaacgaagctagctttggctaagaagctgaacttgacggcaagacaagtggaagtgtggttccaaaacagaagagctagaaccagttaaagcaaacggaggtagattgcgaatacttgaaacggtgcgtagagaagctaacggaagagaaccggagacttcagaagaggctatggagcttcgaactctcaagctgtctccacaattctacggtcagatgactccaccaactacactcatcatgttccttcgtgcgagcgtgtgggtggcccatcatcatcgaaccatcaccacaatcacaggcccgtttctatcaatccgtgggtgcttgtgctggtcaggtggctcatgggctgaattttgaagccttgcgtccacgatcgtgattttttattttagtggtggaaaagggtgttttggtatttttcgttatcgttatatagtctatctgtgtggggtcattgtaattttggatgattggcctttcatgaactagtcctatgtatgatgcaaccttaaaaagatttaaattagcaaaaattagttacaaactt

SEQ ID NO: 145 - DNA, 946 bp, Arabidopsis thaliana
atgggggaaagagatgatgggttgggtttgagtctaagcttgggaaatagtcaacaaaaagaaccatctctgaggttgaacttatgccgttgacaacttcttcttcttcttcttcgtttcaacacatgcacaatcagaataacaatagccatccccagaaattcataacatctcttggactcatctgtttcaatcttctgggattaaacgtacaactgcagagagaaactccgacgccggtcatttctaagaggtttcaacgtgaacagagctcagtcttcggtggcggtagtggacttggaagaagaagccgccgtcgttcgtctccaaacagcgccgtttcgagtctgagtggaaataaaagggatcttgcggtggcgagaggaggagatgaaaacgagcggagagagcttcttgctcacgcggagggggaagcggtggtagcgacgatgaagacggcggaaacggcgacggatcaagaagaaactacggttatcgaaggatcaagctcttgttctcgaggagacttttaaagaacatagcactcttaatccgaagcaaagctggctctagcaaaacagttgaatctaagggcaagacaagttgaagtgtggtttcagaaccgtagggcaaggacgaactgaaacaaacggaggttgattgtgagtatttaaagagatgttgcgataatctgaccgaggagaatcgacggctgcagaagaagtgtcggagctgagggcgttgaagttgtctccacatctctacatgcacatgactcctcctactactctcaccatgtgccttcttgcgaacgtgtctcctcctctgccgccactgtgaccgctgctccttccactactactactcctacggtggtgggcggccaagtccacagcgattaactccttggactgctatttctctccagcaaaaatcaggtcgctag

SEQ ID NO: 146 - DNA, 1334 bp, Oryza sativa
acgctttaaaagcttcctcctcctcctcgccaaccaccaccctcagtccctcacctccatttccatcaagcccaagaacgactcaccacgctagtgttgagaagtggagagagttgagaggaatcaatggagatgatggttcatgggaggagagacgagcgtatggcgggctcaggctcgggcttgggcttgggctcagcctcggcgtcgccggtggtgcagccgacgacgagcagccgcgccgcgccgtggtgccgccccgccgccgcagcagcagctgtgcggctggaacggcggcggtctcttctcctcgtcttcctcgatcatcgggggaggtcggcgatgatggcgtgccacgacgtcatcgagatgccgttcctgcgggggatcgacgtgaacctgcgccggcggcagagacgaccacgacgacggcgagggggcccagctgcagcgaggaagacgaggagcccggcgcgtcctccccaacagcacgctctccagcctcagcggcaagcgcggcgcaccatctgccgccaccgccgccgccgccgccgccagcgcgacgaggactccggcggcggatcccgcaagaagctccgcctctccaaggaccaagccgccgtcctcgaggacaccttcaagagcacaacaccctcaatcccaagcagaaggcggcgctggcgaggcagctgaatctgaagccgcggcaggtggaggtgtgttccagaacaggagggcgaggacgaagctgaagcagacggaggtggactgcgagctgctcaagcgctgctgcgagacgccaccgacgagaaccgccgcctccaccgcgagctccaggagctccgcgccctcaagctcgccaccgccgccgccgcgccgcccacctctacggcgcccgcgtcccgccgcccaccaccctcaccatgtgcccctcctgcgagcgcgtcgcctccgcagccacaccacccgcaacaactccggcgccgcccccgcgcggccggtgcccacccgcccgtggccgccggcggcggcgcagaggtgtcggcgtagagaccccactactgattaattagttaattagagatgagtagtggctttttcttaattagcagggtattaataattacttaattagggttggacccctgtagttttcttgtttatactacgtgtataatttagctctggttttgaacttttaattagtttcataatctttttttttcctatctctcacttcaccctgtttgttgtttactcagcaaagaatatggtgtcttgtataaagtgatgcatgaaatggatcataaaagttttcaatattaattccttca

SEQ ID NO: 147 - DNA, 566 bp, Populus trichocarpa
tttcaacgaggaattgacatgaacagggtgccagctgcagtgacagattgtgatgacgaaactggggtttcttcaccaaaagtacgctatccagcttaagtggtaaaagaagcgaaagagaacagattggagaagaaacagaagcggagagggcctcttgtctcgtgacagtgatgatgaagatggtgctggtggtgatgcttctaggaagaagctgagactctcaaaggaacagtctttgtgcttgaagagactttcaaggaacataatactcttaatcccaaggagaagctggccttggcaaagcagttgaatctcagcctaggcaagtggaggtgtggtttcagaaccgaagagcaaggactaagttgaagcaaactgaagtcgattgcgagtacctaagaggtgctgtgaaaatctaacagaggagaacaggaggttacagaaggaggtgcaagagcttagagcactgaaactttccctcagctctacatgcacatgaaccctcccaccaccctcaccatgtgcccttcatgcgagcgagttgctgtctcgtcagctcatca

SEQ ID NO: 148 - DNA, 1334 bp, Oryza sativa; identical to SEQ ID NO: 146

SEQ ID NO: 149 - DNA, 1517 bp, Oryza sativa
gagctggggccccaccccaccccgcgtcgcaattaataattggtcgcgactcgcgacgagatccactcgcaccagctcatatttgctcctccactccaccactatttataaccccccttcgcctcctccacccccactcatctcctccacctcctccacccgccgccatttgatcgaacacctgatagccatgatggatctcggcctcagcctcggcctcggcctcgcctcgcagggcagctcacctcctccaccaccaccacctcctcccccggcgccggatcatcctccccgtgggccgccgcgctcaactccatcgtggcgacgtgaggcgggatcaggccgcggcgcatgctgccgcggcggtgggggttggggttgggggcgaggagatgtaccagggagggcgtccacgtcgccggacagcgcggcggcgctgtcgagcgcgagcgggaagagggagagggagctggagcggtcggatccggggttgacgacgacgacggcgcggacggcgccggcgggcggaagaagctcaggctgtccaaggaccaggccgcgtgctcgaggagtgcttcaagacgcactccactctcaaccccaagcagaaggtggcgctggcgaacaggctggggctgcgccgcggcaggtggaggtgtggttccagaaccggagggcgaggacgaagctgaagcagacggaggtggactgcgagtacctaagcggtggtgcgagcgcctcgccgacgagaacaagcgcctcgagaaggagctcgccgacctcagggcgctcaaggccgcccctcgccggcgtccgcgtccgcgatgcagccctcctcctccgccgccgccacgctcaccatgtgcccctcctgccgccggtcgccaccgccggcgcgccgcaccagcctaaccaccaacaatgccatcccaaatctaacaccaccatctcctcctcctcaccgccgccgccgccgtcgccgtcgccggcggcaacgtgctgcccagccactgccagttcttcccggccgccgccgccgcgccgaccggacaagccagagcacgtggaacgccgccgcgccgctcgtcaccagagagctcttctagaaacaatccatccacgccatgacaaacttgggaaaggatcaagctttgattggtcaagacagtgtttttaccaggtggtgatttggttaattaataattataattaatcactcaagaggaggggattaattgccttgatttggtacctaattactagtatgattagcagtagtatagtagcagcaaatttggtttggattaattcagtttgattccatgatatgaacaaaggaacaaagcaacaaaaaaatggcgtctgctttttcttggacggcattcttatatgtaccaattcaccaaatctgctggttggtggattaacagcttgataattgtatattgattgtactactaccactaattgattgaattatgagaaaagttaatgaaatcttttctaattcttcagca

SEQ ID NO: 150 - DNA, 1251 bp, Oryza sativa
ttaggtcaaagcagcagcctcgatcgcaaactgcaggatcgtcgctggctgggcctcaagaatctccaaagcagatccaccacgcgccaccagctcatcattgtcgaccaatcttcttttcttgatttcaatccatgatcttctcatctatttatacccccgtcttcttctcctcctctcttcatcgtctccgacgccgacgaactcccactcactagtagcacttacttgtagctattgtctagagcacttaagacatggagaggcaaggcttggatcttggcctgagcctcgggctaggcttgacgacggcggcgacaggccggctgctgggttctgtctgaactccggcatggcggagcaggaagtgatcaggcgtgatgatgtggttgcggcgacgcggcggaggatgagaggttcgcgtgctcacccggcagcccggtgtcgagcggcagcgggaagcgaggcagcggcagcggcgcggcgacgaggtcgacgacgccggctgcgacgtcggcggcggcggcgcgcgcaagaagctgcggttgtccaaggaccagccgccgtcctcgaggagtgcttcaagacgcaccacaccctcactccgaagcagaaggtggcgctggcgaagagcttgaactgcggccgcggcaggtggaggtgtggttccagaaccgccgcgcgaggacgaagctgaagcagacggaggtggactgcgagacctcaagcggtggtgcgaccagctcgccgacgacaaccgccgcctccacaaggagctcgccgagctcagggcgctcaagccacgcccacaccgcccgccgccgcgccgccattgaccaccctcacaatgtgcctctcctgcaagcgcgtcgccaatgccgcgtgccctcgccggcggcggcgatattccccggccacccccagttcttgtgcggattcagagatcacgccggagcagcgcgtcgtcgtacggcggcgcatcatctggactcgcgaaggcggtcagggcggcgaggtagatcgatcgatgcgcgcgccgcatgatcgacatgaccaagctagcgatctctagctagaagatgatgacattgagcaagacgcaagagtagaacagagttgattgatctctcgttttcctgtgtatttttaaggatcaagtgcaaagttaatttagtttttgacaaatgtaggatggatccagtatgcacatgaaaagttgatgaaataacatgagaagaactaattaattga

SEQ ID NO: 151 - DNA, 1661 bp, Oryza sativa
acttccaagttccaactctcagctagctgcaaactctactcagtttgcatcgagatatacagagatcgagtagtcagagcgagagctagtggagagaaagcaccagggaagaacgcagagagaggttacagggagcgatgatggagagggccgaggacctcgcctgagcctcagtctcagctcgccgcttattgctcctcgtactcaccatgtcgccatgctgttccacgctcctccagaaaaagattcctggagatgccgctgctccctgctgcgaagcggagcgaggtcgtcgcggcagaagaggagcgcgcgggcctcgcggcggcggcggcagcgacgaggaggacggtggctgcggcatcgacggctcacgcaagaagctccggctttccaaggacagtccgccgtgctcgaggacagcttccgggagcaccccaccctcaaccccaggcagaaggcaactttggcgcagcagctgggcttcggcctcggcaggtcgaggtgtggtttcagaacagacgcgcaaggacgaagctgaagcagacggaggtggactggagttcctgaagcgctgctgcgagacgctcacggaggagaaccggaggctgcagaaggaggtgcaggagctgcgagcgctaagctcgtctcgccgcacctctacatgaacatgtccccgcccaccacgctcaccatgtgcccctcctgcgagcgcgtctcaacaccaataacaactccagcgccgccgccgccgccgaccgccgcggcatcaggactactactgccgcaggcggcggcaggtcgtcgacaccgccgccgacgggggcatcctctgccaccgcccgatcgccgtccggccgcagcagtcatgacaagctagtagctttttacttcctagctagacagactacacccgtacactgtccccatgtgtcaacgaggcagcaagcagtgtacgtgacattatattcgcgcaagctgtgtgtgttgcgctcaccgatcgatcgctcagttgttgtttttttcctttttgttggaagagctagctggctagctattagcatggtgttcatgcgtcaggtggagtagtagctataggcggcgctgggatagaacaggatgtctcggcagcttctggccggcggtggtggtgttcgcgggcgggccggctgggagctgggcgtagcgaatatttagctgtccaggggaaagttggatatggtgggatacgggtgtaggggaagtggggcgcagcgggatggcacggtggtttgttctgtccggctgacgatgacggcgatgatgatgagagggtcagtttgtttgttggacagtcgtttctcttaagcttgattctagcattaatttaacacgggtaggcatgtgcatttggtctctgctgagcttaatttaggtgattagtagtgtgttctttaattgccggccgggaaagccatagcttgcatgcatgcatgaaagtttccttgtgttttgatgggatattatccgctaactgaaaggttcgatcggtttgttcgcttaatcatgtgaacggctaaatataaatatgtactactactggatatcgagtaacgaatcactggatataatcgaattgaattgcccggtcgaggaatatgcaccattcgatcggaggtggt

SEQ ID NO: 152 - DNA, 1342 bp, Glycine max
ttcattctctttctcttttcctttcacacaaactcctcttatgatgggtcttgatcaagatgctagcagcaactctggccttcagcttattctagggttagctttgactgccaccaccaccaccactccatcatcaccaccatccatttccaacaagcttgatcatgttgatcatcaccaccatcttataactcttagaccaacaacaaagtcatcctataattcctctgaggctgaaccatcattaacgttgggtctttcccgggagagttacctcaaagtccccaaaagcatcataggacacaacaacaacaaagtctcatcctgtgatgaccctcttgacttgtccacacagactaattcacctcatcacagtgctgtttcctccttctccagtggcagggtcaagagggagagggatctcagctgtgaagaagttgtggatgcaaaagagattgatcagagggatcttagctgtgaaggaataataagagccaccgaagaagaagaagacggcgccgccaccagaaagaaacttaggctcaccaaagaacaatctgctttgctagaagaaagcttcaaacaacatagcaccctcaatcctaaacagaagcaagctttgtcgaagcagttaaatctaaggccacgacaagttgaggtgtggttccagaacaggagagccagaacaaagctgaagcagacagaggtggactgcgagttcctaaagaaatgttgtgaaacattaacagatgaaaacagacggttacagaaggagcttcaagagctgaaggcactgaaactggctcagccgttgtacatgcctatgcctgcggcaacactcgccatgtgcccctcttgcgagaggctcggcggcagcgccgtcaacggtgccggcggttcccccaagacatcattctccatggcccctaagcctcacttcttcaaccccttcgccaatccttctgcagcatgttgattgatattgttattataattaggcttttagttttcattaaaaaaaacaaaagacaaccaaagaagagttcccccacaacctttgtatttttttggttgagggatacgtcttatgaaccagtgaaaaaaggctaaaggtgtaattaactaatatactgtagaaatttgtaaccgctgattagaattactttttactcttcctttattaatgtttttttatggatccctatagaagacatccatctatgaaggaattaatgactattttttttaatagaccacggtcgcaatggtatattcatttgtcaaacaaaagaggccttgagaatacgcgcaagcgctcgctcatcacaaaaaaaaaaaaaaa

SEQ ID NO: 153 - DNA, 1222 bp, Triticum aestivum
gctcagaccagatcattacatcaccaccaccgagcactgccaccgtacgaaccatcgtccatcctcccagtccggggggcgcactctcagatcggatcgggtacgccggagacaagagacgatgatgcatcgcgccgacggcctcgacctgggcctcgggctggggctcggcctcgcttcccagggcagcatcacgtcctccaccaccaccgccgcatcctcctccccggcctccgcctcccactcgcagcactggaccgccgcgctcagctccgtcatcggcctgcggaaggaggaaccgggggtgcaggcttccacgtcgcccgagagcggcggcacaaagaggggcctggaacggaccggctccggcctggccgcgggcagcgacgaggacgacgacggcggtgatggcaccggcgggcgcaagaagctcaggctctccaaggaccaggccgccgtcctcgaggaatgcttcaagacgcacagcacgcttaaccccaagcagaagacggcgctggcgaaccggctgggcctccggccgcggcaggtggaggtgtggttccagaaccgccgggcgcgcaccaagctcaagcagacggaggtggactgcgagtacatgaagcgctgctgcgagcagctcgccgagcagaaccgccgcctcgagaaggaggtagccgagctccgcgcgctcaaggccgcgccgccggcgcacagcgcggcagcagcggcggggccactgaccaccctcaccatgtgcctctcctgcaagcgcgtcgcgtccacgtcttctgcctcggcctgcgacgtgcccaacttttccactaatgccggcatgggcatgcccatgccatccccggtggcactgccagaccaccggcagtttttttgcgggtacagagacaccggagcaacgtacggcggcttttcgggcctcgccaaggtggtcaagccggccagatagaacgagctatttctgtgacgccgccatgatcagcatgccaagcaagctataacaaaaatggcggcattgtcacaactcacaaacttaagctggtttagcagaaagtttagtccttcgttttctcagtctcagggggaaatgtaagttaattaattctagcaatttagggccgaattatccatcgaaatgagttcccggcggggatggatgtatgaatgtgaaaattaatgaaatgacatgagaaataattccccactcaaa

SEQ ID NO: 154 - DNA, 738 bp, Medicago truncatula
cggccgggcggcggcgacgacggaagacgtcgacgacggcacctcattgtcatcccccagcagttctgtgtcaccatttgcaatggatttcagtatgaggaataataacaatgctgaatatggaggaagaaataagagagaaaatgaaggtgaagctgaaagaggaagtgatgatgatgaaaatgggtcaactaggaagaaactaagactctctaaagatcaatctgcttttcttgaagaaagtttcaaagaacacaccactcttaatcctaagcaaaaacttgcacttgcaaaacagttgaatcttagtcctcgtcaagttgaagtttggtttcaaaatagaagagcaaggacaaagttaaagcaaacagaagtggattgtgagtatttgaagagatgttgtgagacattaacagaagagaatagaagattacaaaaggaacttcaagagcttagagctttgaaaactactcaaccattctacatgcaacttccagctaccactctcactatgtgtccttcttgtgaacgtgtagctacaaacccttgcaacaaccaaacaaacaccaacaagtcaagattctctaatgctcaagcccaagcccaagcccatcagatttcttcatgaccttataatcttatatgatcacatggaaaattttcttttttatttggttttcagataatatatatgatagataatatcatagagggtgtgacaaagtgttaattagtttc

SEQ ID NO: 155 - DNA, 1328 bp, Arabidopsis thaliana
tccataaggccacaacagatcttcttgttcctctctctcaatctctctctctaaaactcttattttcttcgtaagagatggaactagcgttgtctctaggcgacaatactaagaaacagttctcttttatggagaagaactcgaagattaataatccctctgtctcgtcgacatctacttccgagaaggatcttgggttctgcatggctttagatgttgcttttggtggtcacagatcgttgtcatcctcttcgtctccgtcggtagaggatgagaagaagaaaccggcgcccagagcaaaaaaatctgacgaatttagggtttcgtcttctgtagatccaccattacagcttcagcttcacttccctaattggctccctgagaacagtaaaggtcgacaaggaggaagaatgcccttaggagcagctacggttgtggaggaggaagaggaggaggaggaagcggtgcctagtatgtcagtatcgccgccggatagtgtaacgtcgtcgtttcaattggactttgggattaaaagttatggttatgagagaagaagcaataagagagatattgatgatgaagtggagagatcagcttcaagagccagcaacgaagacaacgatgacgagaatggatccactaggaagaaacttagactctccaaagaccaatctgcttttcttgaagacagcttcaaagaacacagtacccttaatcctaaacagaagattgcattggcgaagcagttgaatcttcgtcctcgtcaggttgaagtctggtttcaaaacagacgagccaggacaaagctgaagcaaacggaagtggactgtgaatacctaaagagatgctgtgagtcactaaccgaagaaaaccggaggcttcaaaaagaggttaaagaattgagaaccttgaagacttccacacccttttacatgcaacttccggccactactctcactatgtgcccttcttgtgaacgtgttgccacttcagcagcacagccctccacgtcagctgcccacaacctctgtttgtccacgtcatcattgattccggttaagcctcggccggccaaacaagtttcatgaaagcacctgcgaaatacagtttgagcaaacggtcgagctagagtggttttaaaagttgtcttcttgtgtatatatttattttacttttcatattttattagagaccgctattttgaaagacgaatagattgattatccggttagtgttttgtttttcttagataggaccggataaaaaacagatggagcaaaagggttgacatgttttattgaatgatagaggaatatagaagaagacaa

SEQ ID NO: 156 - DNA, 1017 bp, Craterostigma plantagineum
  misc_feature (879)..(879): n is a, c, g, or t
  misc_feature (883)..(883): n is a, c, g, or t
  misc_feature (907)..(907): n is a, c, g, or t
  misc_feature (943)..(943): n is a, c, g, or t
  misc_feature (972)..(972): n is a, c, g, or t
  misc_feature (980)..(980): n is a, c, g, or t
  misc_feature (984)..(984): n is a, c, g, or t
ttaggtttgagcctgggaagttttggcccgagcagcagtggaggctcgcatccgccgccggcgttgcctcttccttcgaatcttttccggccatctttgcaggagattgatagaacgcagaggtctatcggtgcatttcttcaggcaccaactgctgctgccgtttgcagagagcccgcgtcagctttccgtgggatcgacgtgaatcgacctccgaccatcgtagactgcggagaagagaataataatccgatcgcctcgccgtcgccgaacagcaccgtctgtagctcaagcgggaaaaggaccagcggcgagagagaggagaaggaagacggagatagggctgcgtcgagctccttcgaggttgaagacgacgacggcggcggcggcgacgcctcggcgaggaagaagctccgcctatccaaggagcaggccgtggtcctcgaggagaccttcaaggagcacagcaccttgaatcccaaggaaaagatcgccctggcgaagcagttgaatctcatgcccaggcaagtggaggtttggtttcagaacagaagggcaaggacgaagctgaagcagacagaagtggattgcgagtatctgaggagatgctgcgagaatctaacagaagaaaaccgaagattgcagaaagaagtcaatgagcttcgagcccttaaactgtcgcctcagttctacatgagcccacccacgaccctaaccatgtgccctcagtgcgagcgcgtggctgcacagccgtcttcagccgccgctatccgcccgccgagccaccaccagaggccggcggcgggtatgaactcttgggctgctatgatttcgcctcgcccatcatgacataagctttagttttttttttcatctgtntganaattggggcaaatttgtaaatttntcgtatttgatgggttgcttttgggttaggaaaaanagcctattgtaggaaaaattgcctctaanatcagtcnccanattgtattttatgaaattatttcattttattgc

SEQ ID NO: 157 - DNA, 909 bp, Pimpinella brachycarpa
atgatgattcatcaaagagaagatcacttgggtctaagcctaagcttgtcctctccagctcacaggccttcatcatcttcatcaccactccaactaaatctagcaccttccatgccaaccccatcaaccccacctttcaacctcttccacaaaaaagaaacctcagatgggtacattcttgacgcgtgcagagtcgaaacgaggtcgtttctgaagggaatcgatgttaaccggctaccggcgacgacagtggacatggaagaagaagctggggtgtcatcacccaacagcacaatatcaagtgtgagtggaaagaggagtcttgagagatctgagaatggtaatggagatgatcttctagattgttctagagggctgattaatagtgatgaagaagatggtgataattctagaaagaaactcaggctttctaaagaccagtccgctattcttgaagatagttttaaagaacacaacactcttaatccaaagcaaaagctggccttggcaaaaagactagggttgagacctcgtcaggtggaggtttggttccagaatagaagggcaaggaccaagttgaagcaaaccgaggttgattgtgagttcttgaaaagatgctgtgagaatctaacagatgaaaataggagattgatgaaggaggttcaagaactgagggcactcaaattatccccacaattctatatgcaaatgacccctcccacaaccctcaccatgtgcccttcatgtgagcgtgtctcggctccaccatcgtcttctacaggcccatcttccacacccgtcgagaccccccggccccaccattcgggttctagtcaccatcgcgtcgcttttaatccatgggccattgcacctgctggtcaccgatcattcgatgcagttccccattga

SEQ ID NO: 158 - DNA, 1211 bp, Arabidopsis thaliana
ttctcttttcatttcccatttcacatctctctctctctataagaaccctagaagaaggtttctcttgtcctccatacacttagcacaactgataaatcttttgaggtaaaatcagctttagatcaaggtttttctagtcatctctactcataaagatcaaagcttttgctattctcattttctaccaagagacaatatcatgatgatgggtaaagaggatttgggtttaagtcttagcttgggatttgcacaaaaccatcctctccagctaaatcttaaacccacttcttcaccaatgtccaatctccagatgtttccatggaaccaaacccttgtttcttcctcagatcaacaaaagcaacagtttcttaggaaaatcgacgtgaacagcttgccaacaacggtggatttggaagaggagacaggagtttcgtctccaaacagtacgatctcgagcacagtgagtggaaagaggaggagtactgaaagagaaggtacctccggtggtggttgcggagatgaccttgacatcactctagatagatcttcctcacgtggaacctccgatgaagaggaagattacggaggtgagacttgtaggaagaagcttagactatccaaagatcaatccgcagttctcgaagacactttcaaagagcacaatactctcaatcccaaacagaagctggctttggctaagaagctaggtttaacagcaagacaagtggaagtgtggttccaaaacagaagagcaaggacaaagttaaagcagaccgaagtggattgcgagtatttgaaaagatgtgttgagaaattaacggaagagaatcggcggctcgagaaagaggcagcggaactaagagcattaaagctttcaccgcggttgtatggtcagatgagtccaccgaccacacttttgatgtgtccatcgtgtgaacgtgtggccggaccatcctcatctaaccacaaccagcgatctgtctcattgagtccatggctccaaatggcccatgggtcaacctttgatgtgatgcgtcctaggtcttaactttaatgctgcttctatgggttgtgtgtgggtcattgtactttttagattattgactctcagctaatgtatccttaaaagcctttttctacttttaaatttactttaatctaattaaattagttattcttgtcttcttgataacaaacaaatttataataat

SEQ ID NO: 159 - DNA, 651 bp, Silene latifolia
atgcggggagtcgcgtcaccgaacagtactgtctcgactgtaagcggaaagcggagtttgtgtgaaagagattctacatctgcaggcgccgctgatgatttggatttggaaagagcttcgtctcgtggtttgagtgatgatgaagatggtggtgataattctaggaagaaacttcgtttgactaaagatcaatctgctattcttgaagatagttttaaagaacataacactcttaatcccaagcaaaaactggctctggctaaacgacttggactaggaccacgtcaggtggaggtatggttccaaaaccggagggcaaggacaaagttgaagcaaacggaggtagactgtgaatttctaaagcgttgttgtgaacaattaacggaggaaaacagaaggttacaaaaggaggttcaagagttacggacattaaagttgtccccacagttttacatgcaaatgaccccaccaactacattaactatgtgtccttcttgtgaacgtgtggctgccccaccctctggtccagtccagcccaagcctcatccctcactcgaatctcggtccagtattcgtcctgtggcgaataacccctgggttactgcagcggttcccatccggtcttttgatgctattcacccccgttcttga

SEQ ID NO: 160 - DNA, 1125 bp, Populus trichocarpa
atggagcttggattaagcttgggagatgcagctactgcttcaaagccatttgggttcatggagaaatctacaaagctcaccaacaaagccagtttagggttttgcatgggcttatcaattggtcaaaatcacacaccacaagaagatgaagataaagagaaacacggcaataatgatcataaatctgacaatacaaacacaacaacaacagcagaagccaataagagaaaaggtctgacagtagacaccaccgattcacctatccagctcgatcttctccctaacactcctgtccctcgtaaccgaaacagctcccccacttatgtggtctatgataatggtaacatgtcaagaggttttgatgtgaatagattccctgctgtgatggttcatgaagatcaggctgatcaagatgtggctgccctttcatcttcaccaccgaacagtgcaacctcttcttttcaaatggatttttgcatgtacagtagtaaaggtagaagtgaatcacataatgaagctgatcaagctgaaagagcttcttcaagagccagtgatgaagatgaaaatggtagcgctagaaagaaactcaggctctctaaagatcagtctgcttttcttgaagaaagcttcaaagagcacaatactctcactcctaaacaaaagcttgcacttgctaaagagcttaatctccgtcctcgccaagtagaagtctggtttcaaaatagaagagcaaggaccaaattgaagcaaactgaagtggattgtgagtacttgaagagatgttgtgagacattaacagaagagaatagaagattacataaggagcttcaagaattaagagctttaaagacttcaaatccattttacatgcaacttccagccactactctcaccatgtgcccctcttgtgagcgagttgccaccacttccacctccaccgcagccgccaccaccaccaccgccactcccacagcaaccgctgcaaccaccaccaccacaaccaataaccagaacaacaccgctgaccccacatctaaaaccacagggttgtcgcttggtagtactagaccaaggttctatccattttctcacacacagactcaccaccaccagcacacagcatga

SEQ ID NO: 161 - DNA, 1077 bp, Picea sitchensis
atggacctgggtttgggcttaggtggtgaagatatcgttgtgaggcctgctgagtcttggatacagtttcagaatatgacgagcgcaacaaaggccgatctcgttcaaaacacggaactgtttctacggctgggactggaactgggttcgcagaggcaaaatacagccaatcccaaccctcccattcagctggatctgcttcctgcagcgcctgttccgcgcggtttttcatggcaccccaacactaaaacttaccgagcggcctctgaaaacggaaactgcgaaggagattacggagaaaccagatcctgtggtcaaggtggaggagctgcgtcggcgtcttccccccggggtttcgatgtgaaccgagttccctcctccgcagacaacgacaatgaggacgacgacgatgcagcggtctcgtcgcccaacagcaccatatcgtcgtttcagatggatttcgccatttgtcatgcgaccagtgctgtgaagagggagagggacggggagcgtgataacaacgctaatgacaacgaactggatagagattgctccagaggaagcgacgaagaagaagggggcggcaccaggaaaaagctccgcctttccaaagagcagtctgcttatttggaagaaagcttcaaagagcacaatacccttaatccgaagcaaaaactggcattggctaagcagcttaaccttcgcccgcgtcaagtagaagtctggttccagaaccgaagagcaaggacgaagctaaagcagacagaagtggactgcgaatatcttaagagatgctatgaaacccttacagaagagaacaggcgattgcagaaagatattcaagaactgagggctctgaaagtggcgcatccaagcttttacatgcacttgcctgcaaccactctcaccatgtgcccttcctgcgagaggatcgcctcagcctcagcaccaccagatagcaacgccaagggcctccatggccatggccacgggtacgggcacggacctaccccatggccgaccctcgcttctgctcatttacgcccgattcggccgcctcctagacttgaacaataa

SEQ ID NO: 162 - DNA, 855 bp, Glycine max
atgacggttcaaaaggaagatttgggcttgagtctaagtttgagcttccctctcctctcctcttctccttccagccacaaccctcagaaaccctcttggaacgaccctattttcacttcttcaggtgaagctggatcattcctccgcggaatcgatgtgaaccgtttaccttctgtggttgattgcgaagaggaagcaggtgtttcatctccaaacagcacggtttctagcgtcagtggaaagcgcagcgagagggaaaccaatggagaagaaaacgacacagacagagcttgttccagaggcatcatcagcgacgaagaagatgctgaaacctctagaaagaaacttagactctccaaagatcagtcaattgtcctggaagagagcttcaaagaacacaacactcttaaccccaagcaaaagttggcactggcgaaacagctgggtcttcgagcgagacaagtggaggtgtggttccagaacagaagggcaaggacgaagctgaagcaaacggaggttgactgcgagtttttgaaaaggtgctgcgagaatctgacggaggaaaacaggaggttgcagaaggaagtgcaagagcttagagcactgaaactttccccgcagttctacatgcacatgaccccacccaccaccctcaccatgtgcccctcgtgtgagcgtgtcgcggttcccccctcctctgccgttgatcctgccacgcgtcaccatcacgtgcctccatctcacccccgggcctttcccattggccatggccaggcccttcgatgccctccgtcccagatcttagactcgcggaaacaaaatgacaaaattgaaaaaaaagataggaagccatga

SEQ ID NO: 163 - protein, 298 aa, Populus trichocarpa
MGDKNDGLGLSLSLGFDATQQNHQQQPSLKLNLMPVPSQNNHRKTSLTDLFQSSDRACGTRFFQRGIDMNRVPAAVTDCDDETGVSSPNSTLSSLSGKRSEREQIGEETEAERASCSRDSDDEDGAGGDASRKKLRLSKEQSLVLEETFKEHNTLNPKEKLALAKQLNLRPRQVEVWFQNRRARTKLKQTEVDCEYLKRCCENLTEENRRLQKEVQELRALKLSPQLYMHMNPPTTLTMCPSCERVAVSSASSSSAAAASSALAPTASTRQPQRPVPINPWATMPVHQRTFDAPASRS

SEQ ID NO: 164 - protein, 309 aa, Populus trichocarpa
MGDKNDGLGLSLSLGYATQRNHHQQPSLKLNLMPLASQNKHKKTSWTDLFQSPDRTCDTRLFQRGIDMNRVPAAVADCDDETGVSSPNSTLSSLISGKRSEREQIGEETEAERASCSRGSDDEDGGDASRKKLRLSKEQSSVLEENFKEHNTLNPVSSSLWYVVVLWLQKEKLALAKQLNLRPRQVEVWFQNRRARTKLKQTEVDCEYLKTCCENLTEENRRLLKEVQELRALKLSPQLYMHMNPPTTLTMCPSCKRVVSSASSSSAAVVSSALAPIASTPQPQRPVPINPWAAMPIHHRTFDAPASSS

SEQ ID NO: 165 - protein, 302 aa, Populus trichocarpa
MMAGKEDLGLSLSLSVPQNQHSLQLNLMPSLVPSTASSSLSGFHPQKPSWNVTFPSSDPNSNSYRAETRSLLRGIDVNRLPSTADCEEEAGVSSPNSTISSISGKRSEREGINGDEHEMERASSHGISDEEDGETSRKKLRLSKDQAAILEESFKEHNTLNPKQKMALAKQLGLRPRQVEVWFQNRRARTKLKQTEVDCEFLKRCCENLTEENRRLQKEVQELRALKLSPQFYMQMTPPTTLTMCPSCERVAAPPTASSTVDARPHPHIGPTRHRPVPMNPWAPAAPVTRGPTPFDAIRPRS

SEQ ID NO: 166 - protein, 286 aa, Solanum lycopersicum
MSSEKEDGLGLSLSLGIMSCPQNNHKTTPSLPLNLLPFMHHHQVSSGRKDEGGERVRGGIDMNEPARMIIECDDEEDEEEDQVLMVSSPNSTVSSVSGKRSHDREENEGERATSSLEDDGGDAAARKKLRLSKEQAAVLEETFKEHNTLNPKQKLALSKQLNLRPRQVEVWFQNRRARTKLKQTEVDCEYLKRCCENLTDENRRLQKEVSELRALKLSPQFYMNMSPPTTLTMCPQCERVAVSSSSSSSSVVNATRAQNHQAPVPMNKPWAAMFASKTLDVQRSQM

SEQ ID NO: 167 - protein, 280 aa, Solanum lycopersicum
MMVEKEDLGLSLSLSFPDNNNNNKKKNTQLNLSPFNLIQKTSWTDSLFPSSDRNIETCRVETRTFLKGIDVNRLPATGDANKEAGVSSPNSTISSVSGNKRSEREANNCDQEEHEMERGGSDEEDGETSRKKLRLSKDQSAILEESFKEHNTLNPKQKLALAKRLGLRPRQVEVWFQNRRARTKLKQTEVDCEFLKRCCENLTEENRRLQKEVQELRALKLSPQFYMQMTPPTTLTMCPSCERVAGPPPSSSGPTSTPMGQAQPRPMPFNLWANALHPRS

SEQ ID NO: 168 - protein, 225 aa, Zea mays
MPFLRGVDVNRAPAGDTRRGSCSEDDEEPGGASSSPNSTLSSSLSGKRAAPARSGGEVADHTPRAGGGSDDEDSGGGSRKKLRLSKDQAAVLEESFKEHNTLNPKQKAALAKQLNLKPRQVEVWFQNRRARTKLKQTEVDCEFLKRCCETLTEENRRLQREVAELRALKLVAPHHYARMPPPTTLTMCPSCERLASASASADQAGRAGPCWGPLPVFVDGPARRP

SEQ ID NO: 169 - protein, 344 aa, Populus trichocarpa
MELALSLGDTSKPFKFLDKTPKLSSKDLGFCMGLGSGFPATTRSQDKLGSHESNYQDDERRVSSDPPLQLDLLPFSPVPRGHQAPSRIRFPWLTDNLVSEPGSTEAPGRRFDVNRLSMDDADEGAAISSPNSAASSFQMDFGIRSGRDRKRDLDAIDAERASSRASDDDENGLTRKKLRLSKEQSAFLEESFKEHNTLNPKQKLALAKQLNLRPRQVEVWFQNRRARTKLKQTEVDCEYLKRCCETLTEENRRLQKELQELRALKTSQPFYMQLPATTLTMCPSCERVATTTTSSSGTTTTTTTTNPSTTTTTSTTSSKPLSLPAKPRLFPLSHGQVQPHHAAS

SEQ ID NO: 170 - protein, 326 aa, Populus trichocarpa
MELALSLGDTSKPFKFLDKTPKLSSKDLGFCMGLGSGFTASTRSHDKLGSHENNHQEDERRVSSDPPLQLVLLPFSPVPRRHQPPSKTRFPWLTDNLVSEPGSTEGSGRGFDVNRLSMDDADEGAALSSPNSAASSFQMDFGIRSGRGNKRDLEAIEASRASDDEENGLTRKKLRLSKDQSAFLEESFKEHSTLNPKQKLALAKQLNLRPRQVEVWFQNRRARTKLKQTEVDCEYLKRCCETLTKENRRLQKELQELRALKTSQPFYMQLPATTLTMCPSCERVATTTTTTNPSTSTTTSKTLSLPAKPRLFPSSHGQVQAHQAAS

SEQ ID NO: 171 - protein, 312 aa, Arabidopsis thaliana
MSERDDGLGLSLSLSLGFNQKDPSSRLNPMPLASYASSSHMQHMQQSNYNHPQKIQNTWINMFQSSERNSDMRSFLRGIDNRAPSTVVVDVEDEGAGVSSPNSTVSSVMSGKKSERELMAAAGAVGGGRVEDNEIERASCSLGGGSDDEDGSGNGDDSSRKLRLSKEQALVLEETFKEHSTLNPKQKMALAKQLNLRTRQVEVWFQNRRARTKLKQTEVDCEYLKRCCENLTDENRRLQKVSELRALKLSPHLYMHMKPPTTLTMCPSCERVAVTSSSSSVAPPVMNSSSPMGPMSPWAAMPLRQRPAAGSH

SEQ ID NO: 172 - protein, 281 aa, Arabidopsis thaliana
MMFEKDDLGLSLGLNFPKKQINLKSNPSVSVTPSSSSFGLFRRSSWNESFTSSVPNSDSSQKETRTFIRGIDVNRPPSTAYGDEDAGVSSPNSTVSSSTGKRSEREEDTDPQGSRGISDDEDGDNSRKKLRLSKDQSAILEETFKDHSTLNPKQKQALAKLGLRARQVEVWFQNRRARTKLKQTEVDCEFLRRCCENLTEENRRLQKEVTELRALKLSPQFYMHMSPPTTLTMCPSCEHVVPPPQPQAATSAHHRSLPVNAWAPATRISHGLTFDALRPRS

SEQ ID NO: 173 - protein, 280 aa, Arabidopsis thaliana
MMMGKEDLGLSLSLGFSQNHNPLQMNLNPNSSLSNNLQRLPWNQTFDPTSDLRKIDVNSFPSTVNCEEDTGVSSPNSTISTISGKRSEREGISGTGVGSGDDHDEITPDRGYSRGTSDEEEDGGETSRKKLRLSKDQSAFLEETFKEHNTLNPKQKLALAKLNLTARQVEVWFQNRRARTKLKQTEVDCEYLKRCVEKLTEENRRLQKEAMELRTLKLSPQFYGQMTPPTTLIMCPSCERGGPSSSNHHHNHRPVSINPWVACAGQVAHGLNFEALRPRS

SEQ ID NO: 174 - protein, 318 aa, Arabidopsis thaliana
MGERDDGLGLSLSLGNSQQKEPSLRLNLMPLTTSSSSSSFQHMHNQNNNSHPQKIHNISWTHLFQSSGIKRTTAERNSDAGSFLRGFNVNRAQSSVAVVDLEEEAAVVSSPNSAVSSLSGNKRDLAVARGGDENEAERASCSRGGGSGGSDDEDGGNGDGSRKKLRLSKDQALVLEETFKEHSTLNPKQKLALAKQLNLRARQVEVWFQNRRARTKLKQTEVDCEYLKRCCDNLTEENRRLQKEVSELRALKLSPHLYMHMTPPTTLTMCPSCERVSSSAATVTAAPSTTTTPTVVGRPSPQRLTPWTAISLQQKSGR

SEQ ID NO: 175 - protein, 308 aa, Oryza sativa
MEMMVHGRRDEQYGGLRLGLGLGLSLGVAGGAADDEQPPPRRGAAPPPQQQLCGWNGGGLFSSSSSDHRGRSAMMACHDVEMPFLRGIDVNRAPAAETTTTTARGPSCSEEDEEPGASSPNSTLSSLSGKRGAPSAATAAAAAASDDEDSGGGSRKKLRLKDQAAVLEDTFKEHNTLNPKQKAALARQLNLKPRQVEVWFQNRRARTKLKQTEVDCELLKRCCETLTDENRRLHRELQELALKLATAAAAPHHLYGARVPPPTTLTMCPSCERVASAATTTRNNSGAAPARPVPTRPWPPAAAQRSSA

SEQ ID NO: 176 - protein, 189 aa, Populus trichocarpa
FQRGIDMNRVPAAVTDCDDETGVSSPNSTLSSLSGKRSEREQIGEETEAERASCSRDSDDEDGAGGDASRKKLRLSKEQSVLEETFKEHNTLNPKEKLALAKQLNLRPRQVEVWFQNRRARTKLKQTEVDCEYLKRCCENLTEENRRLQKEVQELRALKLPQLYMHMNPPTTLTMCPSCERVAVSSASS

SEQ ID NO: 177 - protein, 311 aa, Oryza sativa
MEMMVHGRRDEQYGGLGLGLGLGLSLGVAGGAADDEQPPPRRGAAPPPQQQLCGWNGGGLFSSSSSDHRGRSAMMACHDVIEMPFLRGIDVNRAPAAETTTTTARGPSCSEEDEEPGASSPNSTLSSLSGKRGAPSAATAAAAAASDDEDSGGGSRKKLRLSKDQAAVLEDTFKEHNTLNPKQKAALARQLNLKPRQVEVWFQNRRARTKLKQTEVDCELLKRCCETLTDENRRLHRELQELRALKLATAAAAPHHLYGARVPPPTTLTMCPSCERVASAATTTRNNSGAAPARPVPTRPWPPAAAQRSSA

SEQ ID NO: 178 - protein, 308 aa, Oryza sativa
MMDLGLSLGLGLASQGSLTSSTTTTSSPGAGSSSPWAAALNSIVGDVRRDQAAAHAAAAVGVGVGGEEMYQGRASTSPDSAAALSSASGKRERELERSGSGVDDDDGADGAGGRKKLRLSKDQAAVLEECFKTHSTLNPKQKVALANRLGLRPRQVEVWFQNRRARTKLKQTEVDCEYLKRWCERLADENKRLEKELADLRALKAAPSPASASAMQPSSSAAATLTMCPSCRRVATAGAPHQPNHQQCHPKSNTTISSSSTAAAAVAVAGGNVLPSHCQFFPAAAAAADRTSQSTWNAAAPLVTRELF

SEQ ID NO: 179 - protein, 256 aa, Oryza sativa
MERQGLDLGLSLGLGLTTAATWPAAGFCLNSGMAEQEVIRRDDVVAATAAEDERFACSPGSPVSSGSGKRGSGSGSGDEVDDAGCDVGGGGARKKLRLSKDQAAVLEECFKTHHTLTPKQKVALAKSLNLRPRQVEVWFQNRRARTKLKQTEVDCEHLKRWCDQLADDNRRLHKELAELRALKATPTPPAAAPPLTTLTMCLSCKRVANAGVPSPAAAIFPGHPQFLCGFRDHAGAASSSYGGASSGLAKAVRAAR

SEQ ID NO: 180 - protein, 247 aa, Oryza sativa
MMERAEDLRLSLSLSSPLIAPRTHHVAMLFHAPPEKRFLEMPLLPAAKRSEVVAAEEERAGLRGGGGSDEEDGGCGIDGSRKKLRLSKDQSAVLEDSFREHPTLNPRQKATLAQQLGLRPRQVEVWFQNRRARTKLKQTEVDCEFLKRCCETLTEENRRLQKEVQELRALKLVSPHLYMNMSPPTTLTMCPSCERVSNTNNNSSAAAAADRRGIRTTTAAGGGSVVDTAADGGILCHRPIAVRPQQS

SEQ ID NO: 181 - protein, 311 aa, Glycine max
MMGLDQDASSNSGLQLILGLALTATTTTTPSSPPSISNKLDHVDHHHHLITLRPTTKSSYNSSEAEPSLTLGLSRESYLKVPKSIIGHNNNKVSSCDDPLDLSTQTNSPHHSAVSSFSSGRVKRERDLSCEEVVDAKEIDQRDLSCEGIIRATEEEEDGAATRKKLRLTKEQSALLEESFKQHSTLNPKQKQALSKQLNLRPRQVEVWFQNRRARTKLKQTEVDCEFLKKCCETLTDENRRLQKELQELKALKLAQPLYMPMPAATLAMCPSCERLGGSAVNGAGGSPKTSFSMAPKPHFFNPFANPSAAC

SEQ ID NO: 182 - protein, 279 aa, Triticum aestivum
MMHRADGLDLGLGLGLGLASQGSITSSTTTAASSSPASASHSQHWTAALSSVIGLRKEEPGVQASTSPESGGTKRGLERTGSGLAAGSDEDDDGGDGTGGRKKLRLSKDQAAVLEECFKTHSTLNPKQKTALANRLGLRPRQVEVWFQNRRARTKLKQTEVDCEYMKRCCEQLAEQNRRLEKEVAELRALKAAPPAHSAAAAAGPLTTLTMCLSCKRVASTSSASACDVPNFSTNAGMGMPMPSPVALPDHRQFFCGYRDTGATYGGFSGLAKVVKPAR

SEQ ID NO: 183 - protein, 208 aa, Medicago truncatula
GRAAATTEDVDDGTSLSSPSSSVSPFAMDFSMRNNNNAEYGGRNKRENEGEAERGSDDDENGSTRKKLRLSKDQSAFLEESFKEHTTLNPKQKLALAKQLNLSPRQVEVWFQNRRARTKLKQTEVDCEYLKRCCETLTEENRRLQKELQELRALKTTQPFYMQLPATTLTMCPSCERVATNPCNNQTNTNKSRFSNAQAQAQAHQISS

SEQ ID NO: 184 - protein, 336 aa, Arabidopsis thaliana
MELALSLGDNTKKQFSFMEKNSKINNPSVSSTSTSEKDLGFCMALDVAFGGHRSLSSSSSPSVEDEKKKPAPRAKKSDEFRVSSSVDPPLQLQLHFPNWLPENSKGRQGGRMPLGAATVVEEEEEEEEAVPSMSVSPPDSVTSSFQLDFGIKSYGYERRSNKRDIDDEVERSASRASNEDNDDENGSTRKKLRLSKDQSAFLEDSFKEHSTLNPKQKIALAKQLNLRPRQVEVWFQNRRARTKLKQTEVDCEYLKRCCESLTEENRRLQKEVKELRTLKTSTPFYMQLPATTLTMCPSCERVATSAAQPSTSAAHNLCLSTSSLIPVKPRPAKQVS

SEQ ID NO: 185 - protein, 282 aa, Craterostigma plantagineum
LGLSLGSFGPSSSGGSHPPPALPLPSNLFRPSLQEIDRTQRSIGAFLQAPTAAAVCREPASAFRGIDVNRPPTIVDCGEENNNPIASPSPNSTVCSSSGKRTSGEREEKEDGDRAASSSFEVEDDDGGGGDASARKKLRLSKEQAVVLEETFKEHSTLNPKEKIALAKQLNLMPRQVEVWFQNRRARTKLKQTEVDCEYLRRCCENLTEENRRLQKEVNELRALKLSPQFYMSPPTTLTMCPQCERVAAQPSSAAAIRPPSHHQRPAAGMNSWAAMISPRPS

SEQ ID NO: 186 - protein, 302 aa, Pimpinella brachycarpa
MMIHQREDHLGLSLSLSSPAHRPSSSSSPLQLNLAPSMPTPSTPPFNLFHKKETSDGYILDACRVETRSFLKGIDVNRLPATTVDMEEEAGVSSPNSTISSVSGKRSLERSENGNGDDLLDCSRGLINSDEEDGDNSRKKLRLSKDQSAILEDSFKEHNTLNPKQKLALAKRLGLRPRQVEVWFQNRRARTKLKQTEVDCEFLKRCCENLTDENRRLMKEVQELRALKLSPQFYMQMTPPTTLTMCPSCERVSAPPSSSTGPSSTPVETPRPHHSGSSHHRVAFNPWAIAPAGHRSFDAVPH

SEQ ID NO: 187 - protein, 282 aa, Arabidopsis thaliana
MMMGKEDLGLSLSLGFAQNHPLQLNLKPTSSPMSNLQMFPWNQTLVSSSDQQKQQFLRKIDVNSLPTTVDLEEEIGVSSPNSTISSTVSGKRRSTEREGTSGGGCGDDLDITLDRSSSRGTSDEEEDYGGETCRKKLRLSKDQSAVLEDTFKEHNTLNPKQKLALAKKLGLTARQVEVWFQNRRARTKLKQTEVDCEYLKRCVEKLTEENRRLEKEAAELRALKLSPRLYGQMSPPTTLLMCPSCERVAGPSSSNHNQRSVSLSPWLQMAHGSTFDVMRPRS

SEQ ID NO: 188 - protein, 216 aa, Silene latifolia
MRGVASPNSTVSTVSGKRSLCERDSTSAGAADDLDLERASSRGLSDDEDGGDNSRKKLRLTKDQSAILEDSFKEHNTLNPKQKLALAKRLGLGPRQVEVWFQNRRARTKLKQTEVDCEFLKRCCEQLTEENRRLQKEVQELRTLKLSPQFYMQMTPPTTLTMCPSCERVAAPPSGPVQPKPHPSLESRSSIRPVANNPWVTAAVPIRSFDAIHPRS

SEQ ID NO: 189 - protein, 374 aa, Populus trichocarpa
MELGLSLGDAATASKPFGFMEKSTKLTNKASLGFCMGLSIGQNHTPQEDEDKEKHGNNDHKSDNTNTTTTAEANKRKGLTVDTTDSPIQLDLLPNTPVPRNRNSSPTYVVYDNGNMSRGFDVNRFPAVMVHEDQADQDVAALSSSPPNSATSSFQMDFCMYSSKGRSESHNEADQAERASSRASDEDENGSARKKLRLSKDQSAFLEESFKEHNTLTPKQKLALAKELNLRPRQVEVWFQNRRARTKLKQTEVDCEYLKRCCETLTEENRRLHKELQELRALKTSNPFYMQLPATTLTMCPSCERVATTSTSTAAATTTTATPTATAATTTTTTNNQNNTADPTSKTTGLSLGSTRPRFYPFSHTQTHHHQHTA

SEQ ID NO: 190 - protein, 358 aa, Picea sitchensis
MDLGLGLGGEDIVVRPAESWIQFQNMTSATKADLVQNTELFLRLGLELGSQRQNTANPNPPIQLDLLPAAPVPRGFSWHPNTKTYRAASENGNCEGDYGETRSCGQGGGAASASSPRGFDVNRVPSSADNDNEDDDDAAVSSPNSTISSFQMDFAICHATSAVKRERDGERDNNANDNELDRDCSRGSDEEEGGGTRKKLRLSKEQSAYLEESFKEHNTLNPKQKLALAKQLNLRPRQVEVWFQNRRARTKLKQTEVDCEYLKRCYETLTEENRRLQKDIQELRALKVAHPSFYMHLPATTLTMCPSCERIASASAPPDSNAKGLHGHGHGYGHGPTPWPTLASAHLRPIRPPPRLEQ

SEQ ID NO: 191 - protein, 284 aa, Glycine max
MTVQKEDLGLSLSLSFPLLSSSPSSHNPQKPSWNDPIFTSSGEAGSFLRGIDVNRLPSVVDCEEEAGVSSPNSTVSSVSGKRSERETNGEENDTDRACSRGIISDEEDAETSRKKLRLSKDQSIVLEESFKEHNTLNPKQKLALAKQLGLRARQVEVWFQNRRARTKLKQTEVDCEFLKRCCENLTEENRRLQKEVQELRALKLSPQFYMHMTPPTTLTMCPSCERVAVPPSSAVDPATRHHHVPPSHPRAFPIGHGQALRCPPSQILDSRKQNDKIEKKDRKP

SEQ ID NO: 192 - DNA, 1839 bp, Medicago sativa
atgtcgtccgccgctgggggcggcgggtacggcggcggccagggtggaggcgcggagcaccaccaccaccaccacgggcacgccggtcacctcctgctccaccaccatccgcagcacgtggccggcgcggccgttgcggcagcggccgcggcggcgggcgggcagatgtaccacgtgccccagcacagccggcgcgagaagctccggttcccgccggacgccggggactcgccaccgcctcatggtcatggtcatggtcatgccccgcagcagcagcagcagcacgggtcgtggcctccgcccccggcgttctactcgtacgcgtcctcgtcgtcgtcgtactccccgcacagccctactctagcgcaggcgcagctggtggcgcacgggctggcgccgccgctcccgcagatcccgacgcagaacttctcgctgtcgctctcctccgcgtcgtcgaatcctccaccaccgcaggcgcagccgaggaggcagctcggcggcctcgcgcaggccacggggccgttcggtcccttcaccggctacgccgccgtgctcggccggtcccgtttcctcggcccggcagagaagctgttcgaggagatctgcgacgtcggcggcgctgcttcgcacgtcgaccgcaccatctccgacgagggcctgctcgacgcggatccgatggacggcgtcgatcatgacgtcgttgatcacgacctcggcggcgctgaccgcgcagcggccgacgctggccccatctcgggggccgagcagcagtggaagaagacgaagctcatctccatgatggaagaggtttgcaagaggtaccggcagtactaccagcaggttcaggctgtgatggcctcgttcgagaccgtcgccgggttcagcaacgccgcgccgttcgcggcattggcgctgagggcgatggcgaagcacttcaagtgcttgaagagcatgattctgaaccagctgcgcaacacgagcaacaaggtcgctgtgaaggacgggctaaacaaggagatcgccgtgttcgggctcgccgggggtagcagcggcggcgccggcctccagcgagcgaacagcgcgagcgcgttcggccagccgcacaatatttggcgcccacagagggggctccccgagcgcgctgtgtccgttttacgcgcgtggctgttcgaacacttcctgcacccgtatcctaccgatggtgataagcaaatgctagcaaaacaaacaggcttgacacgcaaccaggtatcgaactggtttatcaacgcaagggttaggttgtggaagccaatggtggaagaaattcacaacctagagatgaggcaaatgcacaagcactcggtggttgacaagggccagcatagcgtgcatcatcaggcccagcattcttcgcagtgcagcgggaatccctccgttccttcggactcccatcctggacagagcagcagcataactcggaaccacaacaccgctgcctcccagggcttcccggatgagctctcccagatgtcccagtccatccagggacaggtgagcttcgcatacaacgggctgacctcgcagcacaacattgcatcaccacatcatcagcaccagcaggtcggcggtgttggtatcggaggcggcaatggcggtgtctccctcacccttggtcttcaccagaacaacagggtctgcatcgccgagcctctcccggctgctctcccggccaacctagctcaccgtttcggactggaggaagtcagtgacgcctatgtgatgagctcatttggaggtcaggaccggcatttcgggaaggagattggtggtcacttgctgcatgattttgtcgggtga

SEQ ID NO: 193 - protein, 612 aa, Medicago sativa
MSSAAGGGGYGGGQGGGAEHHHHHHGHAGHLLLHHHPQHVAGAAVAAAAAAAGGQMYHVPQHSRREKLRFPPDAGDSPPPHGHGHGHAPQQQQQHGSWPPPPAFYSYASSSSSYSPHSPTLAQAQLVAHGLAPPLPQIPTQNFSLSLSSASSNPPPPQAQPRRQLGGLAQATGPFGPFTGYAAVLGRSRFLGPAEKLFEEICDVGGAASHVDRTISDEGLLDADPMDGVDHDVVDHDLGGADRAAADAGPISGAEQQWKKTKLISMMEEVCKRYRQYYQQVQAVMASFETVAGFSNAAPFAALALRAMAKHFKCLKSMILNQLRNTSNKVAVKDGLNKEIAVFGLAGGSSGGAGLQRANSASAFGQPHNIWRPQRGLPERAVSVLRAWLFEHFLHPYPTDGDKQMLAKQTGLTRNQVSNWFINARVRLWKPMVEEIHNLEMRQMHKHSVVDKGQHSVHHQAQHSSQCSGNPSVPSDSHPGQSSSITRNHNTAASQGFPDELSQMSQSIQGQVSFAYNGLTSQHNIASPHHQHQQVGGVGIGGGNGGVSLTLGLHQNNRVCIAEPLPAALPANLAHRFGLEEVSDAYVMSSFGGQDRHFGKEIGGHLLHDFVG

SEQ ID NO: 194 - DNA, 1551 bp, Arabidopsis thaliana
atggctgaggagggttttgaaaattattatcatatcccacaacaaagtagaagagaaaaacttcgttatttatctcaaaaccaaacaagtttcattgaatcttcacccacccttaaccctagtttttcacctttaccttctctttacgatccttcactcatttcacctttagatgctataaacagtaacccttttctttatcaaatgaatcatgtatacaaccatggtggtagtaatagtaacaacaatgaagttatgttgttaaaatctgaaccattatctttgtctttatcgtcaaacaaaaacaaccagaatcagatgagtgctgctaattttcagcgttatggttctgttgttgatgtttctaggaacacggttccgttaggaccgtttacgggttatgcttctgttttgaagggatcgaggtttttgaaacctgcacaacaattattggatgagatatgtgatgttggtgttcgtgctgagaagattattgctgatgctgatgcatctttgatggaaactaatcatgttattggtggaatgataaatggtgttgatgatgaagatacacttggtggtgatggaaggaagaacaagtctagattattaacagtgcttgatgaggtttgcaggaggtacagacaatactatcagcagattcatgcagtaataacttcatttgaatatgttgccggcctcggtaacgcagctccgtatgcaagtttggctataaatgccatgtccaaacattttagattcttgaagaatgtgattaccgaccagcttcagtttatcggtaagtctaattatcatataagcaatagaaaggatgaatctcccaggtttcacaacggcgatggagccccttacagtcaaagtccagggtttatggaacacgtccaacaacctgtttggcgacctcaaagagggttgcccgagcgtgctgtcagtgtttttaggggatggttgtttgaacactttttgcatccttaccctagtgatactgacaagctaatgttggctaaacaaactggtctatctcgtaaccaggtgtctaattggtttataaatgcaagagtaaggctttggaaaccaatggtggaggaaatacacatgcttgaatcacagcaatctccaaaggaatcacaaagagatgaacatagtcgaaacaatttaagcgagaacaacattgctgagaatccatctacgtccacagacaagtttatcgatgttgcatataaacgcactagaaacgaacttcacaacatgtcagtgccgaatcatagtatcgcaagcaatcaacaggttggtaatgttggagtgagcatgatgaataatggtgcaacaagcaatggtgtatctctgacgctcggtcttcatcaaaatcatggaattgggttgtccgagcctttcaacatgagtgccgcgcagcgttttggtcttgcacatcaacctgatagttacgccgcgagcggttttcaattgcagaataggcaatttgggagagattttattggtgggcaacttttgcgtgactatgtaggatga

SEQ ID NO: 195 - protein, 516 aa, Arabidopsis thaliana
MAEEGFENYYHIPQQSRREKLRYLSQNQTSFIESSPTLNPSFSPLPSLYDPSLISPLDAINSNPFLYQMNHVYNHGGSNSNNNEVMLLKSEPLSLSLSSNKNNQNQMSAANFQRYGSVVDVSRNTVPLGPFTGYASVLKGSRFLKPAQQLLDEICDVGVRAEKIIADADASLMETNHVIGGMINGVDDEDTLGGDGRKNKSRLLTVLDEVCRRYRQYYQQIHAVITSFEYVAGLGNAAPYASLAINAMSKHFRFLKNVITDQLQFIGKSNYHISNRKDESPRFHNGDGAPYSQSPGFMEHVQQPVWRPQRGLPERAVSVFRGWLFEHFLHPYPSDTDKLMLAKQTGLSRNQVSNWFINARVRLWKPMVEEIHMLESQQSPKESQRDEHSRNNLSENNIAENPSTSTDKFIDVAYKRTRNELHNMSVPNHSIASNQQVGNVGVSMMNNGATSNGVSLTLGLHQNHGIGLSEPFNMSAAQRFGLAHQPDSYAASGFQLQNRQFGRDFIGGQLLRDYVG

SEQ ID NO: 196 - DNA, 1755 bp, Gnetum gnemon
atggatatgataaaaccagattttcaacaaatccgaagagataagtttagagttgagcaaatgaatgattttcccaacacttggactcagcagcagcatcagaacatcagaattcccaacaaccttgatttgattggtatcttacagaaccagatttccgtaccggttcaaaccgatttgtatcaagattctgccgcaacctttatgaacatgcctcagtcgatacatagagacccacaaggccctagtaattggagaatcagtgatttgtcacaacctagtaccgtgaatcacggatatgatcaggctggtattaggccaaacaacgttgcagatttgttgtccgatcatttcagttctcgaaaccaaatattggaccgtcctctttatgtcggccgggactctattcctcagtctagcatgattaggagaagtgaagtttcttgtctagacgataatcaaaagggttgtgtaacggtggcttgttcgggtactggtaatgagattttaaggagcagttatgatcaaggttcttcttctggaagttaccgaggagaattttcgtttctcccaagtttggagaatcaatcagttgcgcacaatgcaagcaactggaaccacggaccagtgaatgttactgccacttctcatactaatagtaagaaaggctttccactctcacttttgtctgatatccctccatctagagacgttggaaatgcagctgttttgtcaacaatgaatattcacggcccactcgggcctttcacgggatatgcatcgatactgaagagttcgaggttcttggagccggctcagaaaatgttagaagagttttgtatctcttatgcttcaaagattattagtagaagtgaatctacttccatggaggatgatgatgatgatgatgataacttgtcagggtttagtagttcttctgagccattagaacccaagaatagactaaagaaagcaaaacttctctttctgcaagaagaggtttgcaagtggtacaaactatataatcatcagttgcaaacagttatgtcttccttcaatacagtggctggtctaaacaccgcaacaccgtatatctcgttggctctcaaacggacttcacgaagtttcaaggcccttagaaccgcaatagctgaacatgtgaagcaaatctcaagtcactcatcaaacggtaacaacaacaaccgattccaaaagaggcaaagatctttgattggtaacaatgtcgggtttgaatctcaacaacaacatatctggaggcctcaaaggggattgcccgaacgtgcagtggctgttcttagagcatggctctttgaccattttcttcatccgtaccccactgattctgataagcagatgctagccactcaaactggtctctctcgtaaccaggtatcaaattggttcataaacgcccgtgtgcgattatggaaacctatggtggaagaaatacacacacttgagaccaaagcaattaaaaatgcagatactagtcacaacattgagccatcaaatagaccgaatactgttagcagtccgagccatgaacaaacgctaacgggcctctccgggacaaaacggtcgaggttagagtacatggacatggtggggttcaatagagggaacgtgtcactcacgttagagcttaggcgtggtgtggacaatgttatccaaacgcagactcaggatcatcagtttggaactggaagccaaatgtttcatgactttgtgggttga

SEQ ID NO: 197 - protein, 584 aa, Gnetum gnemon
MDMIKPDFQQIRRDKFRVEQMNDFPNTWTQQQHQNIRIPNNLDLIGILQNQISVPVQTDLYQDSAATFMNMPQSIHRDPQGPSNWRISDLSQPSTVNHGYDQAGIRPNNVADLLSDHFSSRNQILDRPLYVGRDSIPQSSMIRRSEVSCLDDNQKGCVTVACSGTGNEILRSSYDQGSSSGSYRGEFSFLPSLENQSVAHNASNWNHGPVNVTATSHTNSKKGFPLSLLSDIPPSRDVGNAAVLSTMNIHGPLGPFTGYASILKSSRFLEPAQKMLEEFCISYASKIISRSESTSMEDDDDDDDNLSGFSSSSEPLEPKNRLKKAKLLFLQEEVCKWYKLYNHQLQTVMSSFNTVAGLNTATPYISLALKRTSRSFKALRTAIAEHVKQISSHSSNGNNNNRFQKRQRSLIGNNVGFESQQQHIWRPQRGLPERAVAVLRAWLFDHFLHPYPTDSDKQMLATQTGLSRNQVSNWFINARVRLWKPMVEEIHTLETKAIKNADTSHNIEPSNRPNTVSSPSHEQTLTGLSGTKRSRLEYMDMVGFNRGNVSLTLELRRGVDNVIQTQTQDHQFGTGSQMFHDFVG

SEQ ID NO: 198 - DNA, 2643 bp, Oryza sativa
atgccactttacgacgcaagtatgatacctggttccgaaatgttcaatttctcggcggaagcagaacttttgagctttcaatcaaagaatttaagttcgcaacagtctgcttcaagcgaagacgctgtttcctgcagaccagtagctgcggggccgttcacgagctttgggcacactgtctccaaagacagtgttgtgtcaaacgttaccagctggaaaaactacagtgcgcaaggaagtgaagaatggcctggtagggtcattttgaatagtgtggggtacgaaggagggcaggattcccttgcaacgccacttatgctaggaggaagtgttaaggaagtagcagctcaggcggacgcaatgcgactctatttgatgaatccaggatacgatgcttattccgaagcgtcaacggctgcgcattcatcaaacaacattgcaaatcaaatacacgatgtccacaaacagattgttgaagttcctgctcattttcaatcttatattcagaatcatgctgtttcagtggttggggaaacctcacattccagtggaagccaatgggttagtggcacaaatgaactggctcttcttcccagttacagtgacattcaaaatgggcattatttgccatcatcgcgttactacggcattggaagctgggctaatcgccacaatgcgcttcaagattcataccaaggagccttcgtggaagggaaagttggggttgaggtaaggccgcagcagctttccatcgggcgcgatgggtgcgggccttccggccaaggactttctctgtctctttcgccccaccaaccctcagaggtgcctctgcaccaaattgatgcagtatgtaaccgtacgaacatcttacaattatctgctgatcagttaaaaggtaaatcagaagacgttcagagccggaacgagggggcacatggtcctcagggtcatccgtctccgtactcgcggcgtgtcctcagtagagtaggggcgcctatggatttgcaaatgaacgtgggaccattgggccctttcacaggttatgctaccattttgaagggctccaagtacttgaagccggcacagcagctgttagaggagttttgcaacgttggaaaggggctaaactaccagtgcaacccttcaaaacagaagcttttgggccatcacttgtctgcagagaaaagtttacccgacgccgtcattcctccaatcagtacaactgtgaaaggtgaagttgatggaaggaaggctagtgcctgtgcagcgtcttcatcaatgtctgtggttgacaaaacatcaagtgagcctgccatgggagagcaactggttatttctggcgctagattcgagatgcataagaagcggacgaggttgctagctttgcttgacgagttacaaaggagatacaggcagtacaatgatcaaatgcagatgatcattacatcttttgaatctgtaggtggcttgggagctgctgcaccttacacatctcttgcattgaaagcaatgtcaagacattttaaatgtttaaaagatgcaattggtgatcagctgaaggtgatcagcaaggctttaggtaacgagtcgtctcttccaggagtcagcgtaggggaaacgccaagactgaggttggtagatcaaggcatcagaaaccagcgcagtgtgcatcacctaggaatgcttgagcagcatgcatggcgcccccagagaggtcttcctgagcgtgcagtctcggttcttcgtgcatggctctttgaacattttttacacccgtaccccacagatgcggataagcacatgttggcgagacaaactggcctttctagaagtcaggtttctaattggtttattaacgcaagggtcggactttggaagcctatggtggaggaaatgtatgaactagagacgagggaagcatcgcaagtggatgcaccgcctggaaaaaccgatcgcgaggaaagagacactagtaaaggtggcattagcacagaaaaaaatgcatctgggcgtggcaaagtacttatggaaactatttcagagatgcagtcggtttctggttgtggaagcagttccaaattagaacaaacgaccagtacctcccaaaatggtcatgaaaattgtggtacatcagtgagcatccctttggagtcatcttatttgcatgctcatgaagcagatgctgcaagagagacagccgtgaacgttaataggcatttctctgggcaaacacagggaatgcccacgtcccattcagcgatttcaggcgtagaaagtgacagtggttatgctgatagctccggttttagttacgaacaggcaaccaagagactcagacaaggcctgggaaatactattgatttttcttcctacatgggtggaagaatttctcatgaaagcttgaatcccagaccaaccgggaacgctagtgtctctttaacattgggcctgcgtcacagtggtgcacaagaaaagtataccggtgctctctatttgcccagagaagatactcttcaaggctgcaattcccgttatgagatccatgaaatccatgacggtcataatcaggcatgcgtcggtggctttgaaactcatgatattcaatttagaaagcatcttattggaactcagcttcttcaatga

SEQ ID NO: 199 - protein, 880 aa, Oryza sativa
MPLYDASMIPGSEMFNFSAEAELLSFQSKNLSSQQSASSEDAVSCRPVAAGPFTSFGHTVSKDSVVSNVTSWKNYSAQGSEEWPGRVILNSVGYEGGQDSLATPLMLGGSVKEVAAQADAMRLYLMNPGYDAYSEASTAAHSSNNIANQIHDVHKQIVEVPAHFQSYIQNHAVSVVGETSHSSGSQWVSGTNELALLPSYSDIQNGHYLPSSRYYGIGSWANRHNALQDSYQGAFVEGKVGVEVRPQQLSIGRDGCGPSGQGLSLSLSPHQPSEVPLHQIDAVCNRTNILQLSADQLKGKSEDVQSRNEGAHGPQGHPSPYSRRVLSRVGAPMDLQMNVGPLGPFTGYATILKGSKYLKPAQQLLEEFCNVGKGLNYQCNPSKQKLLGHHLSAEKSLPDAVIPPISTTVKGEVDGRKASACAASSSMSVVDKTSSEPAMGEQLVISGARFEMHKKRTRLLALLDELQRRYRQYNDQMQMIITSFESVGGLGAAAPYTSLALKAMSRHFKCLKDAIGDQLKVISKALGNESSLPGVSVGETPRLRLVDQGIRNQRSVHHLGMLEQHAWRPQRGLPERAVSVLRAWLFEHFLHPYPTDADKHMLARQTGLSRSQVSNWFINARVGLWKPMVEEMYELETREASQVDAPPGKTDREERDTSKGGISTEKNASGRGKVLMETISEMQSVSGCGSSSKLEQTTSTSQNGHENCGTSVSIPLESSYLHAHEADAARETAVNVNRHFSGQTQGMPTSHSAISGVESDSGYADSSGFSYEQATKRLRQGLGNTIDFSSYMGGRISHESLNPRPTGNASVSLTLGLRHSGAQEKYTGALYLPREDTLQGCNSRYEIHEIHDGHNQACVGGFETHDIQFRKHLIGTQLLQ

SEQ ID NO: 200 - DNA, 1839 bp, Oryza sativa
atgtcgtccgccgctgggggcggcgggtacggcggcggccagggtggaggcgcggagcaccaccaccaccaccacgggcacgccggtcacctcctgctccaccaccatccgcagcacgtggccggcgcggccgttgcggcagcggccgcggcggcgggcgggcagatgtaccacgtgccccagcacagccggcgcgagaagctccggttcccgccggacgccggggactcgccaccgcctcatggtcatggtcatggtcatgccccgcagcagcagcagcagcacgggtcgtggcctccgcccccggcgttctactcgtacgcgtcctcgtcgtcgtcgtactccccgcacagccctactctagcgcaggcgcagctggtggcgcacgggctggcgccgccgctcccgcagatcccgacgcagaacttctcgctgtcgctctcctccgcgtcgtcgaatcctccaccaccgcaggcgcagccgaggaggcagctcggcggcctcgcgcaggccacggggccgttcggtcccttcaccggctacgccgccgtgctcggccggtcccgtttcctcggcccggcagagaagctgttcgaggagatctgcgacgtcggcggcgctgcttcgcacgtcgaccgcaccatctccgacgagggcctgctcgacgcggatccgatggacggcgtcgatcatgacgtcgttgatcacgacctcggcggcgctgaccgcgcagcggccgacgctggccccatctcgggggccgagcagcagtggaagaagacgaagctcatctccatgatggaagaggtttgcaagaggtaccggcagtactaccagcaggttcaggctgtgatggcctcgttcgagaccgtcgccgggttcagcaacgccgcgccgttcgcggcattggcgctgagggcgatggcgaagcacttcaagtgcttgaagagcatgattctgaaccagctgcgcaacacgagcaacaaggtcgctgtgaaggacgggctaaacaaggagatcgccgtgttcgggctcgccgggggtagcagcggcggcgccggcctccagcgagcgaacagcgcgagcgcgttcggccagccgcacaatatttggcgcccacagagggggctccccgagcgcgctgtgtccgttctacgcgcgtggctgttcgaacacttcctgcacccgtatcctaccgatggtgataagcaaatgctagcaaaacaaacaggcttgacacgcaaccaggtatcgaactggtttatcaacgcaagggttaggttgtggaagccaatggtggaagaaattcacaacctagagatgaggcaaatgcacaagcactcggtggttgacaagggccagcatagcgtgcatcatcaggcccagcattcttcgcagtgcagcgggaatccctccgttccttcggactcccatcctggacagagcagcagcataacccggaaccacaacaccgctgcctcccagggcttcccggatgagctctcccagatgtcccagtccatccagggacaggtgagcttcgcatacaacgggctgacctcgcagcacaacattgcatcaccacatcatcagcaccagcaggtcggcggtgttggtatcggaggcagcaatggcggtgtctccctcacccttggtcttcaccagaacaacagggtctgcatcgccgagcctctcccggctgctctcccggccaacctagctcaccgtttcggactggaggaagtcagtgacgcctatgtgatgagctcatttggaggtcaggaccggcatttcgggaaggagattggtggtcacttgctgcatgattttgtcgggtga

SEQ ID NO: 201 - protein, 612 aa, Oryza sativa
MSSAAGGGGYGGGQGGGAEHHHHHHGHAGHLLLHHHPQHVAGAAVAAAAAAAGGQMYHVPQHSRREKLRFPPDAGDSPPPHGHGHGHAPQQQQQHGSWPPPPAFYSYASSSSSYSPHSPTLAQAQLVAHGLAPPLPQIPTQNFSLSLSSASSNPPPPQAQPRRQLGGLAQATGPFGPFTGYAAVLGRSRFLGPAEKLFEEICDVGGAASHVDRTISDEGLLDADPMDGVDHDVVDHDLGGADRAAADAGPISGAEQQWKKTKLISMMEEVCKRYRQYYQQVQAVMASFETVAGFSNAAPFAALALRAMAKHFKCLKSMILNQLRNTSNKVAVKDGLNKEIAVFGLAGGSSGGAGLQRANSASAFGQPHNIWRPQRGLPERAVSVLRAWLFEHFLHPYPTDGDKQMLAKQTGLTRNQVSNWFINARVRLWKPMVEEIHNLEMRQMHKHSVVDKGQHSVHHQAQHSSQCSGNPSVPSDSHPGQSSSITRNHNTAASQGFPDELSQMSQSIQGQVSFAYNGLTSQHNIASPHHQHQQVGGVGIGGSNGGVSLTLGLHQNNRVCIAEPLPAALPANLAHRFGLEEVSDAYVMSSFGGQDRHFGKEIGGHLLHDFVG

SEQ ID NO: 202 - DNA, 1038 bp, Oryza sativa
atggtggccagcaagcagctccactcgcagcgatgtggcggccactactgccagctgcaccaccaccggccggaggagatcgccggcgccggtgccgagagacaccggagggacgggtcgagcggctgcggcggcgctggtccgatggtcgtgctgaccctcgggtccggcgccgcggcggctgaagacaacggtggcggccgctcgcgctgctgctgcggtgccggtggcgccgcgccggcgacgatggtttccccgttgcgtggttcgaggtacctgctgccggcgcaggagctgctccgcgaggcggtgtccgccgccgccgccagcgcgcgaggtggcgacgacgacgacgaggcggtggcgagcttcccgcacgacggcaagagcaccggcattggcggcggcggcggcgtccaagccaagctcctcagccttctcagcgagctggagagccggcacgagcactacttcggggagctgaggcgggtgtcggcgtcgttcgagccggcgctgggcgccggcgccacggccgggtacacggcgctcatggcgcaggccatgtcgcgccacttcggcagcctgcgccgcgccatactgcgcaagctcaggctccacgccgccgcggcggccaggacgaggtcggcgttgctgcggctggtccgggacgccatggaggaggacgacgagggcgacggcgaggaggaggaggaggtggtgaacagggtggtccggcggacgaagcaggcggcggcggcgagggcggagcaggcgtggaggccgctccggggattgccggaggacgccgtgggcgtgctccgggcatggctcttcgaccatttcctccacccgtatccgaatgacaacgagaagctcatgctggccgtggctacgggtctaagcagaacccaaatatcgaactggttcatcaacgcgcgagtgcggctgtggaagcccatggtggaggagatgtacaacgacgagttcgacgacgacgacgccggcagcggcggcggcggcgcttcgtcctcctcgtga

SEQ ID NO: 203 - protein, 345 aa, Oryza sativa
MVASKQLHSQRCGGHYCQLHHHRPEEIAGAGAERHRRDGSSGCGGAGPMVVLTLGSGAAAAEDNGGGRSRCCCGAGGAAPATMVSPLRGSRYLLPAQELLREAVSAAAASARGGDDDDEAVASFPHDGKSTGIGGGGGVQAKLLSLLSELESRHEHYFGELRRVSASFEPALGAGATAGYTALMAQAMSRHFGSLRRAILRKLRLHAAAAARTRSALLRLVRDAMEEDDEGDGEEEEEVVNRVVRRTKQAAAARAEQAWRPLRGLPEDAVGVLRAWLFDHFLHPYPNDNEKLMLAVATGLSRTQISNWFINARVRLWKPMVEEMYNDEFDDDDAGSGGGGASSSS

SEQ ID NO: 204 - DNA, 1803 bp, Oryza sativa
atgtcgtccgccgcggggggaggaggagggtacgggggcggaggcggcgagcatcagcatcagcagcagcaccaccacctgctgcttgggcaggcggcggggcagctgtaccacgtgccgcagcacagccggcgggagaagctgcggttcccgcccgaccacccggcggagtcgccgccgccgccgccgcccgggtcgtggccgctgcccccggcgttctactcctacgcgtcgtcctcgtcatcgtactcgccgcacagcccgacgctggcgcactcgcagttggtggcgcatgggatgccgccgggggccgcgacgagcggaggggcccagatcccgagccagaacttcgcgctgtcgctgtcgtcggcgtcctcgaaccctccgcccacgccgaggaggcagtttggcggcggcggcggcggggccgccgggccgtacgggcccttcacgggctacgccgccgtgctcgggcggtccaggttcttgggccccgcgcagaagctgctcgaggagatctgcgacgtcggcggccgccccgcgcagcttgacaggggctccgacgagggtttgctcgacgtagacgccatggaggccgcgggaagcgtcgaccacgagatggacggcagcgatcgcgccgtcgcggacgcggtcacggtctccggcgccgagcagcagtggaggaagactaggctcatctcgcttatggaagacttcaaggctcttttaagctcccttctaaaactagcaggaggtgatccgcagtttatctataatcaaaaggtttgcaagcgatacaggcaatactaccagcaactccaagctgtagtatcgtcctttgagactgttgcgggtctgagcaatgctgctccttttgcttccatggctcttaggacaatgtcgaagcatttcaagtatttgaagggcattatactgaaccagctgcgcaatacgggcaagggtgctacaaaagatggtctcggcaaggaagacacagcaaactttgggcttatgggcggcggcgctggcctactaaggggaaacaatgtgaattcgtttagccaacctcacaacatatggcgcccgcaaagagggctacctgagcgtgctgtttcggttcttcgtgcatggctattcgaacacttcctgcacccgtatccaactgacagcgataagcagatgcttgctaaacagacaggattaactaggaaccaggtatcgaactggtttatcaatgcaagggttaggctctggaagccaatggttgaagaaattcacaacctcgagatgaggcagctgaagaatccgtctcttgacaagaatcagctctccatgcagcacacccaacattcgtcggacagcagcgggaagccctgtgatccatcaaactcgctgcaaggacaaagtagcagcatgaccaggaatcacagcatctccgcctcccggcacatcgaggacggcctctcccagatgccccatgacatctccggtcaggtgagcttcgcatacaacgggctcgccgcgcatcacagcatcgcgatggcgcaccaccaccaacctgacctcattggcaccggtggtgccgcgaatgctggcggtgtctcactcacccttggccttcaccagaacaataaccgagcttacattgctgagccccttccggccgcgcttccgctcaatcttgcccatcgtttcggactggaggacgttagtgatgcctacgtgatgagctcatttggtggtcaggaccggcatttcaccaaggagatcggtggccatttgctccatgactttgttggttga

SEQ ID NO: 205 - protein, 600 aa, Oryza sativa
MSSAAGGGGGYGGGGGEHQHQQQHHHLLLGQAAGQLYHVPQHSRREKLRFPPDHPAESPPPPPPGSWPLPPAFYSYASSSSSYSPHSPTLAHSQLVAHGMPPGAATSGGAQIPSQNFALSLSSASSNPPPTPRRQFGGGGGGAAGPYGPFTGYAAVLGRSRFLGPAQKLLEEICDVGGRPAQLDRGSDEGLLDVDAMEAAGSVDHEMDGSDRAVADAVTVSGAEQQWRKTRLISLMEDFKALLSSLLKLAGGDPQFIYNQKVCKRYRQYYQQLQAVVSSFETVAGLSNAAPFASMALRTMSKHFKYLKGIILNQLRNTGKGATKDGLGKEDTANFGLMGGGAGLLRGNNVNSFSQPHNIWRPQRGLPERAVSVLRAWLFEHFLHPYPTDSDKQMLAKQTGLTRNQVSNWFINARVRLWKPMVEEIHNLEMRQLKNPSLDKNQLSMQHTQHSSDSSGKPCDPSNSLQGQSSSMTRNHSISASRHIEDGLSQMPHDISGQVSFAYNGLAAHHSIAMAHHHQPDLIGTGGAANAGGVSLTLGLHQNNNRAYIAEPLPAALPLNLAHRFGLEDVSDAYVMSSFGGQDRHFTKEIGGHLLHDFVG

SEQ ID NO: 206 - DNA, 1839 bp, Oryza sativa; identical to SEQ ID NO: 192

SEQ ID NO: 207 - protein, 612 aa, Oryza sativa; identical to SEQ ID NO: 193

SEQ ID NO: 208 - DNA, 1041 bp, Oryza sativa
atggtggccagcaagcagctccactcgcagcgatgtggcggccactactgccagctgcaccaccaccggccggaggagatcgccggcgccggtgccgagagccaccggagggacgggtcgagcggctgcggcggcgctggtccgatggtcgtgctgaccctcgggtccggcgccgcggcggctgaagacgacggtggcggccgctcgcgctgctgctgcggtgccggtggcgccgcgccggcgacgatggtttccgcgttgcgtggttcgaggtacctgctgccggcgcaggagctgctccgcgaggcggtgtccgccgccgccgccagcgcgcgaggtggcgacgacgacgacgaggcggtggcgagcttcccgcacgacggcaagagcaccggcattggcggcggcggcggcggcgtccaagccaagctcctcagccttctcagcgagctggagagccggcacgagcactacttcggggagctgaggcgggtgtcggcgtcgttcgagccggcgctgggcgccggcgccacggccgggtacacggcgctcatggcgcaggccatgtcgcaccacttcggcagcctgcgccgcgccatactgcgcaagctcaggctccacgccgccgcggcggccaggacgaggtcggcgttgctgcggctggcccgggacgccatggaggaggacgacgagggcgacggcgaggaggaggaggaggtggtgaacagggtggtccggcggacgaagcaggcggcggcggcgagggcggagcaggcgtggaggccgctccggggattgccggaggacgccgtgggcgtgctccgggcatggctcttcgaccatttcctccacccgtatccgaatgacaacgagaagctcatgctggccgtggctacgggtctaagcagaacccaaatatcgaactggttcatcaacgcgcgagtgcggctgtggaagcccatggtggaggagatgtacaacgacgagttcgacgacgacgacgccggcagcggcggcggcggcgcttcgtcctcctcgtga

SEQ ID NO: 209 - protein, 346 aa, Oryza sativa
MVASKQLHSQRCGGHYCQLHHHRPEEIAGAGAESHRRDGSSGCGGAGPMVVLTLGSGAAAAEDDGGGRSRCCCGAGGAAPATMVSALRGSRYLLPAQELLREAVSAAAASARGGDDDDEAVASFPHDGKSTGIGGGGGGVQAKLLSLLSELESRHEHYFGELRRVSASFEPALGAGATAGYTALMAQAMSHHFGSLRRAILRKLRLHAAAAARTRSALLRLARDAMEEDDEGDGEEEEEVVNRVVRRTKQAAAARAEQAWRPLRGLPEDAVGVLRAWLFDHFLHPYPNDNEKLMLAVATGLSRTQISNWFINARVRLWKPMVEEMYNDEFDDDDAGSGGGGASSSS

SEQ ID NO: 210 - DNA, 1743 bp, Oryza sativa
atgtcgtccgccgcggggggaggaggagggtacgggggcggaggcggcgagcatcagcatcagcagcagcagcaccacctgctgcttgggcaggcggcggggcagctgtaccacgtgccgcagcacagccggcgggagaagctgcggttcccgcccgaccacccggcggagtcgccgccgccgccgccgcccgggtcgtggccgctgcccccggcgttctactcctacgcgtcgtcctcgtcatcgtactcgccgcacagcccgacgctggcgcacgcgcagttggtggcgcatgggatgccgccgggggccgcgacgagcggaggggcccagatcccgagccagaacttcgcgctgtcgctgtcgtcggcgtcctcgaaccctccgcccacgccgaggaggcagtttggcggcggcggcggcggcggcggggccgccgggccgtacgggcccttcacgggctacgccgccgtgctcgggcggtccaggttcttgggccccgcgcagaagctgctcgaggagatctgcgacgtcggcggccgccccgcgcagcttgacaggggctccgacgagggtttgctcgacgtagacgccatggacgccgcgggaagcgtcgaccacgagatggacggcagcgatcgcgccgtcgcggacgcggtcacggtctccggcgccgagcagcagtggaggaagactaggctcatctcgcttatggaagacgtttgcaagcgatacaggcaatactaccagcaactccaagctgtagtatcgtcctttgagactgttgcgggtctgagcaatgctgctccttttgcttccatggctcttaggacaatgtcgaagcatttcaagtatttgaagggcattatactgaaccagctgcgcaatacgggcaagggtgctacaaaagatggtctcggcaaggaagacacaacaaactttgggcttatgggcggcggcgctggcctactaaggggaaacaatgtgaattcgtttagccaacctcacaacatatggcgcccgcaaagagggctaccagagcgtgctgtttcggttcttcgtgcatggctattcgaacacttcctgcacccgtatccaactgacagcgataagcagatgcttgctaaacagacaggattaactaggaaccaggtatcgaactggtttatcaatgcaagggttaggctctggaagccaatggttgaagaaattcacaacctcgagatgaggcagctgcagaagaatccgtctcttgacaagaatcagctctccatgcagcacacccaacattcgtcggacagcagcgggaagccctgtgatccatcaaactcgctgcaagggcaaagtagcagcatgaccaggaatcacagcatctccgcctcccggcacatcgaggacggcctctcccagatgccccatgacatctccggtcaggtgagcttcgcatacaacgggctcgccgcgcatcacagcatcgcgatggcgcaccaccaccaacctgacctcattggcaccggtggtgccgcgaatgctggcggtgtctcactcacccttggccttcaccagaacaataaccgagcttacattgctgagccccttccggccgcgcttccgctcaatcttgcccatcgtttcggactggaggacgttagtgatgcctacgtgatgagctcatttggtggtcaggaccggcatttcaccaaggagatcggtggccatttgctccatgactttgttggttga

SEQ ID NO: 211 - protein, 580 aa, Oryza sativa
MSSAAGGGGGYGGGGGEHQHQQQQHHLLLGQAAGQLYHVPQHSRREKLRFPPDHPAESPPPPPPGSWPLPPAFYSYASSSSSYSPHSPTLAHAQLVAHGMPPGAATSGGAQIPSQNFALSLSSASSNPPPTPRRQFGGGGGGGGAAGPYGPFTGYAAVLGRSRFLGPAQKLLEEICDVGGRPAQLDRGSDEGLLDVDAMDAAGSVDHEMDGSDRAVADAVTVSGAEQQWRKTRLISLMEDVCKRYRQYYQQLQAVVSSFETVAGLSNAAPFASMALRTMSKHFKYLKGIILNQLRNTGKGATKDGLGKEDTTNFGLMGGGAGLLRGNNVNSFSQPHNIWRPQRGLPERAVSVLRAWLFEHFLHPYPTDSDKQMLAKQTGLTRNQVSNWFINARVRLWKPMVEEIHNLEMRQLQKNPSLDKNQLSMQHTQHSSDSSGKPCDPSNSLQGQSSSMTRNHSISASRHIEDGLSQMPHDISGQVSFAYNGLAAHHSIAMAHHHQPDLIGTGGAANAGGVSLTLGLHQNNNRAYIAEPLPAALPLNLAHRFGLEDVSDAYVMSSFGGQDRHFTKEIGGHLLHDFVG

SEQ ID NO: 212 - DNA, 1839 bp, Oryza sativa; identical to SEQ ID NO: 192

SEQ ID NO: 213 - protein, 612 aa, Oryza sativa; identical to SEQ ID NO: 193

SEQ ID NO: 214 - DNA, 1041 bp, Oryza sativa; identical to SEQ ID NO: 208

SEQ ID NO: 215 - protein, 346 aa, Oryza sativa; identical to SEQ ID NO: 209

SEQ ID NO: 216 - DNA, 1743 bp, Oryza sativa; identical to SEQ ID NO: 210

SEQ ID NO: 217 - protein, 580 aa, Oryza sativa; identical to SEQ ID NO: 211

SEQ ID NO: 218 - DNA, 1839 bp, Oryza sativa
atgtcgtccgccgctgggggcggcgggtacggcggcggccagggtggaggcgcggagcaccaccaccaccaccacgggcacgccggtcacctcctgctccaccaccatccgcagcacgtggccggcgcggccgttgcggcagcggccgcggcggcgggcgggcagatgtaccacgtgccccagcacagccggcgcgagaagctccggttcccgccggacgccggggactcgccaccgcctcatggtcatggtcatggtcatgccccgcagcagcagcagcagcacgggtcgtggcctccgcccccggcgttctactcgtacgcgtcctcgtcgtcgtcgtactccccgcacagccctactctagcgcaggcgcagctggtggcgcacgggctggcgccgccgctcccgcagatcccgacgcagaacttctcgctgtcgctctcctccgcgtcgtcgaatcctccaccaccgcaggcgcagccgaggaggcagctcggcggcctcgcgcaggccacggggccgttcggtcccttcaccggctacgccgccgtgctcggccggtcccgtttcctcggcccggcagagaagctgttcgaggagatctgcgacgtcggcggcgctgcttcgcacgtcgaccgcaccatctccgacgagggcctgctcgacgcggatccgatggacggcgtcgatcatgacgtcgttgatcacgacctcggcggcgctgaccgcgcagcggccgacgctggccccatctcgggggccgagcagcagtggaagaagacgaagctcatctccatgatggaagaggtttgcaagaggtaccggcagtactaccagcaggttcaggctgtgatggcctcgttcgagaccgtcgccgggttcagcaacgccgcgccgttcgcggcattggcgctgagggcgatggcgaagcacttcaagtgcttgaagagcatgattctgaaccagctgcgcaacacgagcaacaaggtcgctgtgaaggacgggctaaacaaggagatcgccgtgttcgggctcgccgggggtagcagcggcggcgccggcctccagcgagcgaacagcgcgagcgcgttcggccagccgcacaatatttggcgcccacagagggggctccccgagcgcgctgtgtccgttttacgcgcgtggctgttcgaacacttcctgcacccgtatcctaccgatggtgataagcaaatgctagcaaaacaaacaggcttgacacgcaaccaggtatcgaactggtttatcaacgcaagggttaggttgtggaagccaatggtggaagaaattcacaacctagagatgaggcaaatgcacaagcactcggtggttgacaagggccagcatagcgtgcatcatcaggcccagcattcttcgcagtgcagcgggaatccctccgttccttcggactcccatcctggacagagcagcagcataacccggaaccacaacaccgctgcctcccagggcttcccggatgagctctcccagatgtcccagtccatccagggacaggtgagcttcgcatacaacgggctgacctcgcagcacaacattgcatcaccacatcatcagcaccagcaggtcggcggtgttggtatcggaggcggcaatggcggtgtctccctcacccttggtcttcaccagaacaacagggtctgcatcgccgagcctctcccggctgctctcccggccaacctagctcaccgtttcggactggaggaagtcagtgacgcctatgtgatgagctcatttggaggtcaggaccggcatttcgggaaggagattggtggtcacttgctgcatgattttgtcgggtga

SEQ ID NO: 219 - protein, 612 aa, Oryza sativa; identical to SEQ ID NO: 193

SEQ ID NO: 220 - DNA, 1743 bp, Populus trichocarpa; identical to SEQ ID NO: 210

SEQ ID NO: 221 - protein, 580 aa, Populus trichocarpa; identical to SEQ ID NO: 211

SEQ ID NO: 222 - DNA, 2508 bp, Populus trichocarpa
atggaaacaagaagttttaggcctgaatcacatgtagcacagcaaagccggagagataagttgagaggtcaacagagtttaacctcagttcagtatttagatgactaccctaacagtttggaacgtatatctgtcagtccagggctaagcccagatcttgttcacgttcgaaataataggaatgacaatacgatttatgattccactatgttttcctcagaaattctcaattttgcaacaagttctcatgttctatcagctcctaaagtttcaattgttgatcaagaactaggtgcagttccgctcaataggcctatacttgccgaggattcttctttcactggtatgacgtctcacccagttttatccaacttcaatgcttcacacaaggccagtagctgtgacccacaaggttgtggtaattggagaagccttgactcacagcaaagttatgatttgatggtgaattatgcaggtggatcagtaggtggggaaagaaatcagaaacctatgtttgttggggaagtcttgtcaaataatgcaagggtaagcaacatttcaacatctagacaatatttgatgcctggttacaatggaaaccagaatgttcagcttccatctacgttaagaaatacctttggtgaaatttcaagtgaagatagcatcaagcagttgagggtgatgcaggttccttctcttccaccataccaaaacgcagcccaagatgtcattccttctggttgttttaggcccagaatgaatgaacgcattctccatccatcttttgtaactgaatcaactgcttcacattttgataataatggcagtacttggatgagcagaccacttgagaactaccatcactggagtactggtgagttgggtcttgttgaaaggacgagtgaccaagagatgatgactattacaagtgatgctaatactcagggtttatctttgtcgctttcatcaattaatccaccatctaaagttgaagttacccattttggagaggaatatgcatctgaacatttgcaattgaaggtggctgatcgtgtttcccaagaatctcatcaagattcaaaattttctaagtcaagttctctgtgtgctttgccgaagccatcaattataactaaaagttgtggaaaatcgattcatgacatcgtggggacttctacgcatgctcttcgcaacactggtcctcttggacctttcactggatatgcaactattctaaagagttcaaaattcttgaagccagctcagcaactgctggaagaattctctagtagaacaggtccaaaactcacgagaatatttgagatgtctgaagatcaagttactgctccagctttggctgacattgttaatgaagccaatgaaaattctggaactaacgccaagaattactcaggcatcccatcctctacattttactgttcaaataaggcaagtggtggtgatgatgtaggtggaagcggcggctcttgtggatcttatgggccagaataccaacaaaagaaggcaaagctcctgttcttgcaagaggaggtttgcagaaggtacaagcaatatcatcaacagatgcaaatggtagcttcttcttttgaatcagtggctagtctcagtgctgccaccccgtatgtttccttggctctcaagacagtctctagcaatttcaggtctctgaaacatggcatctcagaccaactcaagctcgtgacgaaagccctaggagacgatcttttctcccggaatacagttgcagtgggtagtaagggtgatacaattacatcaaggtcaatatacatggatcaaagcattcaaaagaacaaatctggtggggttagtgtgggttaccatgaaccccaacaacacatatggaggccccaaagaggcctaccagaacgttcagttgcaattcttagagcttggctgtttgagcattttctacacccgtaccccacagacactgataagcacatgttagctacgcggacaggtctatctcgaaaccaggtgtcaaattggttcattaatgcccgcgttcgcgtgtggaaacctatggttgaggaaatacatatgcttgaaacaaaaggcttggcagaaatttctggaaagaatgatggaaattctccagagggtaatatccagtcaaatgatgaacaaacctcaaacaaacttggtaaaaattccatgctaaataaacaattggaatgctctggtattggttcctctggaagcagcggtgaacaactggatgaggagcaatggagtgaagggaagaggtcaagagtagaatttcaggttcccaccaccatggatggatcattgatgaattttctgccgtatcagagaagtggtattgataatggtggagctgtttcccttactttgggtctcaggcaaggtattgaaagtgcgcagcaccaaatacaattgcaacaacacaatggtcagtttaagcagtcatttggaggtcagatgattcatgattttgtcggttga

SEQ ID NO: 223 - protein, 835 aa, Populus trichocarpa
METRSFRPESHVAQQSRRDKLRGQQSLTSVQYLDDYPNSLERISVSPGLSPDLVHVRNNRNDNTIYDSTMFSSEILNFATSSHVLSAPKVSIVDQELGAVPLNRPILAEDSSFTGMTSHPVLSNFNASHKASSCDPQGCGNWRSLDSQQSYDLMVNYAGGSVGGERNQKPMFVGEVLSNNARVSNISTSRQYLMPGYNGNQNVQLPSTLRNTFGEISSEDSIKQLRVMQVPSLPPYQNAAQDVIPSGCFRPRMNERILHPSFVTESTASHFDNNGSTWMSRPLENYHHWSTGELGLVERTSDQEMMTITSDANTQGLSLSLSSINPPSKVEVTHFGEEYASEHLQLKVADRVSQESHQDSKFSKSSSLCALPKPSIITKSCGKSIHDIVGTSTHALRNTGPLGPFTGYATILKSSKFLKPAQQLLEEFSSRTGPKLTRIFEMSEDQVTAPALADIVNEANENSGTNAKNYSGIPSSTFYCSNKASGGDDVGGSGGSCGSYGPEYQQKKAKLLFLQEEVCRRYKQYHQQMQMVASSFESVASLSAATPYVSLALKTVSSNFRSLKHGISDQLKLVTKALGDDLFSRNTVAVGSKGDTITSRSIYMDQSIQKNKSGGVSVGYHEPQQHIWRPQRGLPERSVAILRAWLFEHFLHPYPTDTDKHMLATRTGLSRNQVSNWFINARVRVWKPMVEEIHMLETKGLAEISGKNDGNSPEGNIQSNDEQTSNKLGKNSMLNKQLECSGIGSSGSSGEQLDEEQWSEGKRSRVEFQVPTTMDGSLMNFLPYQRSGIDNGGAVSLTLGLRQGIESAQHQIQLQQHNGQFKQSFGGQMIHDFVG

SEQ ID NO: 224 - DNA, 2163 bp, Populus trichocarpa
atggttgatcaagaactaggtccagcacacctccatagccccattgcagctgatgattcttcgttcaccaacatgcctcacccagttttgtcaaacttaaacgcttcacctacagccagtaatggtgatgctcaaggatgtggcaactggacaaagctaggttcagagcaaggttatgatttgactgttgattacacaggtgggtcggttgttggggagaggaatcagaaactgatgtctgctgtggaagtcctgtcaaataatgcaagggtaaccgacatttctacgtatacacaatatttcaagcctagttacaatgaataccgagattttgagcttcaatcttctctagccgacccctcagatgagttttctagtcaagataaccaaaagcagctcagggaaaggcagtttaccactcatccacttcaccaaaatacactgcaagatgttgttacatcaggattggttgggagaactagagaaattattctccatccatcgtttgaaaatcaatcatccactttacattttaatgaccccaatgcttggataagaaggccgaatgagaactctcatcagtggagttgtgagttgggtcttattacaaggaagagttcccaagagctgaggactattccaaacgatgctaatactcaaggcttatctttgtctctttcgtcaaatcagtcatctaaagtcaatgaaactcggtttggagaagcatatgaatctgagtgtttgcaatcaaagaatggtctttccaaagaacctcatcatgtttcaaaagtttccaaggcaagttatatgtgtccattgccaaggccatcaattctaagtaaaggttgcggaaaatctttacatgacttaccaggagatgctacaaatattcttcgaaatgctggtcctcttggacctttcactggatatgcaactattctaagtagctctagattcttaaagccagctcaagagctaatggacgaattctgtggtgttaagggtctggggctcataagaacatctgagttgcccaagaggataggtggagaagctagtcctccagctttgggagactctgttaatgaagctgatacaggggacgaagctaatgatgacaataatttaggtgcctcaccctttacttctcgtagatcaaatgaagaaattggtcattgtggggtaggaaacagttcttcaaaaccttatatgccagagtaccaacaaatgaaggcaaagctcctatatttgcaggatgaggttctcagaaggtacaagcaatatcatcagcagatggaaatggttgcttcattttttgaatcagttgctggtcttagtgctgccacccagtacatttccatggctgtaaaggcagtctcagggaattttaggtccataaaacattgcatctctgatcagctcaagcatgtcacaaaagccctaggagagaatctgttctccccaaatacatttggaagcagaaccgcggggagcttaagatacaaggatcaaagctttcaaaagaacaactctggtgggccaaatgtgggttaccttgagccccaagaacacatctggaggcctcaaagaggcctaccagaacgtgcagtagtgattctcagagcttggctgtttgagcattttcttcacccataccctactgacacagataagcacatgctagccactcaaacaggtctatctcgataccaggtgtcaaattggttcataaatgcccgggtgcgcctttggaaaccaatggttgaagaaatacacactcttgaaaccaaaggtttgctggaaaacaatcgaagttccgggaagaatggtgggaattctgctgagggtgccagccagccagatggtgatcaccgagcctccaaagagctaggtacaagttacatgcctagtaaacaattggaatgctctagcaatattggctcctcagggggcagtagagatcaactagatgccgagcattggaatcaagagaagagatcgagagtggaatctcaggctccgatacatgcagatagatcgttgatgaattttatgctctatcaaaaacctgggagtgaaaatgggggccttggcgcggtttcacttacattgggtctcagacatggtgctgaaaatgctcaacatgaacaattgcaacagtga

SEQ ID NO: 225 - protein, 720 aa, Populus trichocarpa
MVDQELGPAHLHSPIAADDSSFTNMPHPVLSNLNASPTASNGDAQGCGNWTKLGSEQGYDLTVDYTGGSVVGERNQKLMSAVEVLSNNARVTDISTYTQYFKPSYNEYRDFELQSSLADPSDEFSSQDNQKQLRERQFTTHPLHQNTLQDVVTSGLVGRTREIILHPSFENQSSTLHFNDPNAWIRRPNENSHQWSCELGLITRKSSQELRTIPNDANTQGLSLSLSSNQSSKVNETRFGEAYESECLQSKNGLSKEPHHVSKVSKASYMCPLPRPSILSKGCGKSLHDLPGDATNILRNAGPLGPFTGYATILSSSRFLKPAQELMDEFCGVKGLGLIRTSELPKRIGGEASPPALGDSVNEADTGDEANDDNNLGASPFTSRRSNEEIGHCGVGNSSSKPYMPEYQQMKAKLLYLQDEVLRRYKQYHQQMEMVASFFESVAGLSAATQYISMAVKAVSGNFRSIKHCISDQLKHVTKALGENLFSPNTFGSRTAGSLRYKDQSFQKNNSGGPNVGYLEPQEHIWRPQRGLPERAVVILRAWLFEHFLHPYPTDTDKHMLATQTGLSRYQVSNWFINARVRLWKPMVEEIHTLETKGLLENNRSSGKNGGNSAEGASQPDGDHRASKELGTSYMPSKQLECSSNIGSSGGSRDQLDAEHWNQEKRSRVESQAPIHADRSLMNFMLYQKPGSENGGLGAVSLTLGLRHGAENAQHEQLQQ

SEQ ID NO: 226 - DNA, 2508 bp, Sorghum bicolor; identical to SEQ ID NO: 222

SEQ ID NO: 227 - protein, 835 aa, Sorghum bicolor; identical to SEQ ID NO: 223

SEQ ID NO: 228 - DNA, 1065 bp, Sorghum bicolor
atggcgaagcagcagcagcatgacaaggggtcgccaaagcaagctcgcaacgagcccgcgccacccccacagccggcgccgttccggttggagcattgctgccactgcgacggtgcccacggtcaggccgacgacgggcccaacggtgctggcccactgcacctgactctcggcccggccgccgaccgccgccgccgctgctcgtgcggtgtcgcgccggcgccggcggcgcccgtgactgtcgccgtgctccgcgggtcccggtacctgaggccggcgcaggagctgctgggcgacgtcgtgcgcgtggccgacctggcggctggcgacgacgaggacgaggatcaggctgatgcggaccggctcgagggcggtggtcgtcaccggtcgctgcgtcgggccgccgggaacgacggcgacggcgtccaggacaagctcctcggcctgctcagcgagctggagagccggcgggagcgctacttcggcgagctggggcgcgtggtgtcgtcgttcgagccggcgctgggcgacggcgcggcggcggcgtacacgtcgctgatggcgcgggccatggcgcgccacttcggcaacctgcgccgcgccatactgcgcaggctcaggctccacgccgccgccgcggcgaggaggtctctgcggcgtggcgtcgaggccggggaccacgaccacgacgaggacgaggacgaggatggggacgaggaggtgaccgaggagctggtggagagggtggcccggcggacgaagctggccgcggcggcgcgggcggagcaggcgtcgtggcggccgctccgtggcctgcccgacggctccgtggccgtgctccgggcgtggctcttcgaccatttcctccacccgtaccccgacgacggtgagaagctgaggctggcggtgaccaccggcttaagcaggcgccagatatccaactggttcatcaacgcgcgcgtgcggctgtggaagcccatgatcgaggagatgtaccaggacgagttcaccgagggttccgccgtctccagggacgacgacgccagcgcctcctcctcttcttga

SEQ ID NO: 229 - protein, 354 aa, Sorghum bicolor
MAKQQQHDKGSPKQARNEPAPPPQPAPFRLEHCCHCDGAHGQADDGPNGAGPLHLTLGPAADRRRRCSCGVAPAPAAPVTVAVLRGSRYLRPAQELLGDVVRVADLAAGDDEDEDQADADRLEGGGRHRSLRRAAGNDGDGVQDKLLGLLSELESRRERYFGELGRVVSSFEPALGDGAAAAYTSLMARAMARHFGNLRRAILRRLRLHAAAAARRSLRRGVEAGDHDHDEDEDEDGDEEVTEELVERVARRTKLAAAARAEQASWRPLRGLPDGSVAVLRAWLFDHFLHPYPDDGEKLRLAVTTGLSRRQISNWFINARVRLWKPMIEEMYQDEFTEGSAVSRDDDASASSSS

SEQ ID NO: 230 - DNA, 1782 bp, Sorghum bicolor
atgtcgtccgccgcgggcgggtacggcggcggtgcggggagcggcgccgagccccactgccacggccacggccacggcgacttcatgctgcaccaccatgcacagcatatcgccgcccagcagctctaccacgtgccgcagcacagccgtcgcgagaagctacggtttccgccggacgactcgcccccacacgcctccgcttccgccccgcagcagcagcacgccggggtggcctggccgcctccgccgccgccgccggcgttctactcctacgcgtcctcctccacgtcgtcctactccccgcacagccccacgctggcgcaggcgcagctcgtcgtggcgcacggcctcgccccgccgccgctctcgtcgcagatcccgacgcagaacttcgcgctctcgctctcgtcctcgtcctcgaacccaccgcccgcgccgcccccgcagcagaggagggcgcacgccgcgccctcggcgcccttcgggcccttcactggctacgcggccgtgctcgggcgctcccgtttcctcggccctgcggagaagctgctcgaggagatctgcgatgtcgggggcgccgcctcgcacgtggaccggagcgtctccgacgagggcgtgctcgacgctgatccgatggaagccatcgatcacgacatggacggcgccgaccgcgccgcctcggacgctgggccaatctccggcgccgagcagcagtggaagaagactaggcttatctccatgatggaagaggtttgcaagaggtaccggctgtactaccagcaggtccagacagtgatcaactcgttcgagaccgtggccgggttcagcaacgctgccccattcgcggcgatggcgctgagagccatggcgaagcacttcaagtgcctgaagagcatgatactgagccagctgcgcaacaccaaggtcgctgccggcaaggaggggctcagcaaggacatcgtcatgttcgggctcgctggcggcagcgcggctgccctccagagagctagcagcatggccgccttcggccagccgcacaacatctggcggccacagagagggctgccggagcgcgcagtgtctgtcctccgcgcttggctcttcgaacacttcctgcacccatatcctactgatggagacaagcaaatgcttgctaaacagacgggtttaacacggaaccaggtatcaaactggtttattaatgcaagggttcgtctttggaagccaatggtggaggaaatccacaacctcgagatgaggcaggtgcacaaacaccctgttctcgacaagggacagcacgtgttgcatcaccaaacccagcattcgtctgagagcagtggaaaaccctctgatccttccgactctcatctcggccaaagcagcagcctcactaggaaccacaacatccctgcgtcccagggttttgcagatgagctctccgagatgtcccactctattcagcaggggcaggtaacctttgcatacaatgggctgtcgacggcacaccacagcctcgcttcgtcgcagcaccaccagcaggcagggccaatgagtggcattggtggtgcggggaacggtggcgtctccctcacccttggcctccaccagaacaacagagtctgtattgccgagccactcccggagtccctccctcccaacctcgctcaccgttttgggctggaggaggtcagcgacccctacatgatgggctctttcggaaaccaggaccggcatttcggcaaggagatgggtggccatttggtgcatgactttgttggctga

SEQ ID NO: 231 - protein, 593 aa, Sorghum bicolor
MSSAAGGYGGGAGSGAEPHCHGHGHGDFMLHHHAQHIAAQQLYHVPQHSRREKLRFPPDDSPPHASASAPQQQHAGVAWPPPPPPPAFYSYASSSTSSYSPHSPTLAQAQLVVAHGLAPPPLSSQIPTQNFALSLSSSSSNPPPAPPPQQRRAHAAPSAPFGPFTGYAAVLGRSRFLGPAEKLLEEICDVGGAASHVDRSVSDEGVLDADPMEAIDHDMDGADRAASDAGPISGAEQQWKKTRLISMMEEVCKRYRLYYQQVQTVINSFETVAGFSNAAPFAAMALRAMAKHFKCLKSMILSQLRNTKVAAGKEGLSKDIVMFGLAGGSAAALQRASSMAAFGQPHNIWRPQRGLPERAVSVLRAWLFEHFLHPYPTDGDKQMLAKQTGLTRNQVSNWFINARVRLWKPMVEEIHNLEMRQVHKHPVLDKGQHVLHHQTQHSSESSGKPSDPSDSHLGQSSSLTRNHNIPASQGFADELSEMSHSIQQGQVTFAYNGLSTAHHSLASSQHHQQAGPMSGIGGAGNGGVSLTLGLHQNNRVCIAEPLPESLPPNLAHRFGLEEVSDPYMMGSFGNQDRHFGKEMGGHLVHDFVG

SEQ ID NO: 232 - DNA, 1713 bp, Oryza sativa
atgtcttcggcggcgggcggtggtggatacggggccggcggcggcgccgagcaccagcacctgttgctggggcaggcggcggggcagctctaccacgtgccgcagcacagccgccgcgagaagctgcggttcccgcccgacccggccgactcgcccccgcccactgcctggccggcgcccccacccttctactcctacgcgtcctcgtcgacgtcgtcctactcgccgcatagcccaacgccgctggcgcacgcgcagctcgtggcgcacgcgctacctgcaggcgccggggcccagatcccgagccagaacttcgcgctctcgctctcctcggcgtcctcgaaccctccgcccgcgccgcggaggcagctcgccgcgggggtagccacggggccgtacggcccgttcacgggctacgcggccgtcctcggccggtccaggttcctcggccccgcgcagaagctgctcgaggagatctgcgacgtgggcggacggcccccgcacctggaccggcgctccgacgagggcatgctcgacatggacgccatggacgtggttggggacgtggaccatgacatggacggcggtgaccgcgctaccgctgaggcggtcgctgtctccggcgccgagcagcagtggaggaagaccaggctcatctccctcatggaggacgtttgcaggcgatacaagcagtactaccagcagctgcaatctgtgatctcctcgtttgagactgttgcggggctgagcaacgccgccccctttgcttccatggctcttcggacaatgtcgaagcatttcaagtgtctcaaggaaatgataatgagccaattaaggaacacaagcaaggttgtcgccaatgatggtattggcaaagacgatatggctaactttgcgcttatgggtggtggagcaggcctcctgaggggaaacaatgtgaacgcattcggccagcctcacaacatttggaggcctcaaagagggcttcctgagcgtgcagtgtctgtgcttcgctcgtggctgttcgagcacttcttacatccgtatccaactgatagtgacaagcagatgctggctaaacagacaggcttaacaaggaaccaggtgtcaaattggtttatcaatgcaagggtgcggctctggaagcccatggtggaagaaatccacaacctggagatgcggcaggtgcagaagaacacatcggtggacaagaatcaacttggcatgcagcagattcagcactcgacggacagcagtgggaagctttctgacccttcaaactctcagcgtgggcaaagcagcggcatgacaagaaacctcagctctccggcatcacgccatatccaagacgagctctcccagatgccccacgacatgccaggccaggtgagctttgcttacaatgggctccccacacaccacggtcttgcgctgtcacacccccagcaagctgaagcagtcagcgccggcattggccttggcggcgtggctgccggcggtggcggcgtttccctcacactcggccttcaccagaacaacaggacttacattgccgagccacttccggccgcgctcccgctcaacctcccgcaccgttttgggctggaggacgtgagcgacgcctacgtgatggggtcattcggcggcggccaggaccgtcatttcaccaagggaataggtggccaccatttgctccatgactttgttggttga

SEQ ID NO: 233 - protein, 570 aa, Oryza sativa
MSSAAGGGGYGAGGGAEHQHLLLGQAAGQLYHVPQHSRREKLRFPPDPADSPPPTAWPAPPPFYSYASSSTSSYSPHSPTPLAHAQLVAHALPAGAGAQIPSQNFALSLSSASSNPPPAPRRQLAAGVATGPYGPFTGYAAVLGRSRFLGPAQKLLEEICDVGGRPPHLDRRSDEGMLDMDAMDVVGDVDHDMDGGDRATAEAVAVSGAEQQWRKTRLISLMEDVCRRYKQYYQQLQSVISSFETVAGLSNAAPFASMALRTMSKHFKCLKEMIMSQLRNTSKVVANDGIGKDDMANFALMGGGAGLLRGNNVNAFGQPHNIWRPQRGLPERAVSVLRSWLFEHFLHPYPTDSDKQMLAKQTGLTRNQVSNWFINARVRLWKPMVEEIHNLEMRQVQKNTSVDKNQLGMQQIQHSTDSSGKLSDPSNSQRGQSSGMTRNLSSPASRHIQDELSQMPHDMPGQVSFAYNGLPTHHGLALSHPQQAEAVSAGIGLGGVAAGGGGVSLTLGLHQNNRTYIAEPLPAALPLNLPHRFGLEDVSDAYVMGSFGGGQDRHFTKGIGGHHLLHDFVG

SEQ ID NO: 234 - DNA, 1755 bp, Arabidopsis thaliana
atggatatgataaaaccagattttcaacaaatccgaagagataagtttagagttgagcaaatgaatgattttcccaacacttggactcagcagcagcatcagaacatcagaattcccaacaaccttgatttgattggtatcttacagaaccagatttccgtaccggttcaaaccgatttgtatcaagattctgccgcaacctttatgaacatgcctcagtcgatacatagagacccacaaggccctagtaattggagaatcagtgatttgtcacaacctagtaccgtgaatcacggatatgatcaggctggtattaggccaaacaacgttgcagatttgttgtccgatcatttcagttctcgaaaccaaatattggaccgtcctctttatgtcggccgggactctattcctcagtctagcatgattaggagaagtgaagtttcttgtctagacgataatcaaaagggttgtgtaacggtggcttgttcgggtactggtaatgagattttaaggagcagttatgatcaaggttcttcttctggaagttaccgaggagaattttcgtttctcccaagtttggagaatcaatcagttgcgcacaaagcaagcaactggaaccacggaccagtgaatgttactgccacttctcatactaatagtaagaaaggctttccactctcacttttgtctgatatccctccatctagagacgttggaaatgcagctgttttgtcaacaatgaatattcacggcccactcgggcctttcacgggatatgcatcgatactgaagagttcgaggttcttggagccggctcagaaaatgttagaagggttttgtatctcttatgcttcaaagattattagtagaagtgaatctacttccatggaggatgatgatgatgatgatgataacttgtcagggtttagtagttcttctgagccattagaacccaagaatagactaaagaaagcaaaacttctctttctgcaagaagaggtttgcaagtggtacaaactatataatcatcagttgcaaacagttatgtcttccttcaatacagtggctggtctaaacaccgcaacaccgtatatctcgttggctctcaaacggacttcacgaagtttcaaggcccttagaaccgcaatagctgaacatgtgaagcaaatctcaagtcactcatcaaacggtaacaacaacaaccgattccaaaagaggcaaagatctttgattggtaacaatgtcgggtttgaatctcaacaacaacatatctggaggcctcaaaggggattgcccgaacgtgcagtggctgctcttagagcatggctctttgaccattttcttcatccgtaccccactgattctgataagcagatgctagccactcaaactggtctctctcgtaaccaggtatcaaattggttcataaacgcccgtgtgcgattatggaaacctatggtggaagaaatacacacacttgagaccaaagcaattaaaaatgcagatactagtcacaacattgagccatcaaatagaccgaatactgttagcagtccgagccatgaacaaacgctaacgggcctctccgggacaaaacggtcgaggttagagtacatggacatggtggggttcaatagagggaacgtgtcactcacgttagagcttaggcgtggtgtggacaatgttatccaaacgcagactcaggatcatcagtttggaactggaagccaaatgtttcatgactttgtgggttga

SEQ ID NO: 235 - protein, 584 aa, Arabidopsis thaliana
MDMIKPDFQQIRRDKFRVEQMNDFPNTWTQQQHQNIRIPNNLDLIGILQNQISVPVQTDLYQDSAATFMNMPQSIHRDPQGPSNWRISDLSQPSTVNHGYDQAGIRPNNVADLLSDHFSSRNQILDRPLYVGRDSIPQSSMIRRSEVSCLDDNQKGCVTVACSGTGNEILRSSYDQGSSSGSYRGEFSFLPSLENQSVAHKASNWNHGPVNVTATSHTNSKKGFPLSLLSDIPPSRDVGNAAVLSTMNIHGPLGPFTGYASILKSSRFLEPAQKMLEGFCISYASKIISRSESTSMEDDDDDDDNLSGFSSSSEPLEPKNRLKKAKLLFLQEEVCKWYKLYNHQLQTVMSSFNTVAGLNTATPYISLALKRTSRSFKALRTAIAEHVKQISSHSSNGNNNNRFQKRQRSLIGNNVGFESQQQHIWRPQRGLPERAVAALRAWLFDHFLHPYPTDSDKQMLATQTGLSRNQVSNWFINARVRLWKPMVEEIHTLETKAIKNADTSHNIEPSNRPNTVSSPSHEQTLTGLSGTKRSRLEYMDMVGFNRGNVSLTLELRRGVDNVIQTQTQDHQFGTGSQMFHDFVG

SEQ ID NO: 236 - DNA, 1497 bp, Vitis vinifera
atggcggacagtcatcaacccttcaggctccctcagcaaagtaaaagagaaaatccccgcctctttcttcaaaacaaccacccacagcttttctccaccttccaacatgccccagttcaccagcttcattgccctgatcagaacccaaaccctgcaggttttgttaacagcgaaggagtgcatgtggttgggccctcctctgcgtctttttctttccctagttgcggtgaccattctctctcctccattcacaacgctaaagacttggaccaccgtttctcctttggcgctgacgctgtgtctttatctctggctcctcaccatcgccaccaacggtgtgctcctctggagctgaatgcgaagagatacgacgtcgtttccgttcgaggaggaactccgaagccgaacaacgaattgagaagttcggttccgcttggtcctttcacaggctacgcatcgatcttgaagcgatccagctttttgagccctgcgcagcagcttttagacgatttttgtggcgtaggccgtggagtttccgattcggcgtcatttgatcctccgttggaaggaagtggaaccgctgaagatccgatcggttgcagccatggcagcgagcatttctggaagagctccaggctcgcaccgatgctcgacgaggtttacaggagatataagctttactgtcagcagatgcattctgtagttgcatcgtttgaaactgttgctgggcttcaaaatgctgctccatacatatcttttgcgttcaaagccatgtcaaatcatttcaggtacttgaagaatgcaattttggatcaaattcagtttacaggcaaagctcttgtaggccataatattggaaaagacgaaactccaagagtttggacagctgaccaggggtttcatagccaaaaagcagttcagagctcaatgtttcttcaacatcctatttggcggtcccaaagaggacttccagatcatgcggtagctgtactcagggcatggttgtttgaacactttctacatccttatcctactgacttggagaagcaaattttggcccaacgaacaagcctatcaagaaatcaggtttccaactggttcatcaatgcaagagttagactatggaagccaatggtagaagaaatactcacgcttgagacaaagcaagctcaaatggcagcagagggagaggctaacaagccaactgacccccttccttcagcaaatccactgcctctcaggaaaccctttcaaaacacacccacccaaaagatggaagatactcagtctaaacgaagtagaaataaactctcctatatgttcgaacaaagagatgaacaaacgaactttccttacaataatttctcaagcaattaccaaatgggtgttagtggaattgagaaaagtgcaagcaaaggcatatctttagcattgggtctccaccaaaataacagaattgagtcatctacgagcttttttcagcctggaaacaaatag

SEQ ID NO: 237 - protein, 498 aa, Vitis vinifera
MADSHQPFRLPQQSKRENPRLFLQNNHPQLFSTFQHAPVHQLHCPDQNPNPAGFVNSEGVHVVGPSSASFSFPSCGDHSLSSIHNAKDLDHRFSFGADAVSLSLAPHHRHQRCAPLELNAKRYDVVSVRGGTPKPNNELRSSVPLGPFTGYASILKRSSFLSPAQQLLDDFCGVGRGVSDSASFDPPLEGSGTAEDPIGCSHGSEHFWKSSRLAPMLDEVYRRYKLYCQQMHSVVASFETVAGLQNAAPYISFAFKAMSNHFRYLKNAILDQIQFTGKALVGHNIGKDETPRVWTADQGFHSQKAVQSSMFLQHPIWRSQRGLPDHAVAVLRAWLFEHFLHPYPTDLEKQILAQRTSLSRNQVSNWFINARVRLWKPMVEEILTLETKQAQMAAEGEANKPTDPLPSANPLPLRKPFQNTPTQKMEDTQSKRSRNKLSYMFEQRDEQTNFPYNNFSSNYQMGVSGIEKSASKGISLALGLHQNNRIESSTSFFQPGNK

SEQ ID NO: 238 - DNA, 1698 bp, Vitis vinifera
atggcggatggttttgaaccctaccacgtaccacagcagagcagaagggataagcttagagttgtggctcagaaccactcgggctgtgtggaggcagctactaatcttcacggctgcgccggtttgctccctctctacgatccctcactgttgccttccgatttgctaacttgcgccagcgccagcgcccatgagtttcagcaccatagccacccactttcaggctctgctgaggcttgtaaggcaaacccaggttgtgttgttaaagaagaaggcgtgaatttgatgggttatgttgattttgatcagtccttcaatggtggtgagatggtggtgttcaagccggagcccttatcattgacccatcatgagtacgggtctgcaatttttagcgataaggttactggtggctatatggttccgggcattgttggtggtagtggttccacctctaatgatgtatcgaggagttccgtccctctcgggccttttacaggctatgcttcaattttgaagggatcgaggttcctgaaacctgcacagcagttgttggaggagttctgcgacgtgggctgcggactttacgccgaaagagtctcagcggattcgtcgatgatggatcctccaatggagagtctgagtggaactggaattgttgatgatccgctcagttgtggagatgggggggagcaccggagaaaaaagtcgaggctaatttcgatgctagacgaggtttacaggaggtacaagcactactatcaacaaatgcaggcagttgtagcatcatttgaatcggttgctggtctcggcaatgcggctccctatgccgacttggctctgaaagctatgtctaaacacttcaggtgtttgaagaatgccattaccgaccagcttcagttcacaaacaaagcccatggacaaataagtcatggaaaagatgaaagtccaaggtttgggaacactgatagaggcctttatggtcaaagacccatgcacagctcaggatttcttgaacatcaacctgtttggcgaccccaaaggggacttcctgagcgagctgtaactgtactcagggcatggttgtttgaacacttccttcacccttatcctactgatacagacaagctaatgttggctaagcagactggtctctcccggaaccaggtttccaactggttcatcaatgcaagagtaagactttggaagccaatggtggaagagatacacacgctggagacacgacaagctcaaaaatcttcccagagagaggagcgaagtgccgacaggcagagtgatcatttaccttcagcaaactcacttgtgtttgaaaatccatccacctctgctcaaagagttcaagacgccccatcaaaacgtaccagaaatgagctttctgaggtacacgtgggtagtgaggagccaatgaatttatcttacaataacttgtcggcccatccgcatgtgggagttggtgtgagcactgcaggtggaagcagtaatgtttccctgacactgggtcttcaccagaataatgggattggtttatcagagtcctttcctattaatgcagctcaacgttttgggcttggccttgatgcaaatagcgagggatatgttataggtggttttgaagcacaaaatcggcattttggaagggatgttattggagggcaacttttacatgattttgttggctga

SEQ ID NO: 239 - protein, 565 aa, Vitis vinifera
MADGFEPYHVPQQSRRDKLRVVAQNHSGCVEAATNLHGCAGLLPLYDPSLLPSDLLTCASASAHEFQHHSHPLSGSAEACKANPGCVVKEEGVNLMGYVDFDQSFNGGEMVVFKPEPLSLTHHEYGSAIFSDKVTGGYMVPGIVGGSGSTSNDVSRSSVPLGPFTGYASILKGSRFLKPAQQLLEEFCDVGCGLYAERVSADSSMMDPPMESLSGTGIVDDPLSCGDGGEHRRKKSRLISMLDEVYRRYKHYYQQMQAVVASFESVAGLGNAAPYADLALKAMSKHFRCLKNAITDQLQFTNKAHGQISHGKDESPRFGNTDRGLYGQRPMHSSGFLEHQPVWRPQRGLPERAVTVLRAWLFEHFLHPYPTDTDKLMLAKQTGLSRNQVSNWFINARVRLWKPMVEEIHTLETRQAQKSSQREERSADRQSDHLPSANSLVFENPSTSAQRVQDAPSKRTRNELSEVHVGSEEPMNLSYNNLSAHPHVGVGVSTAGGSSNVSLTLGLHQNNGIGLSESFPINAAQRFGLGLDANSEGYVIGGFEAQNRHFGRDVIGGQLLHDFVG

SEQ ID NO: 240 - DNA, 2436 bp, Vitis vinifera
atggagatgaggaactttagacctgaatcgcatgtagcacagcaaagccggcgtgataagcttagagttcaacatcaaagttcaaccccagctcaccatttggaggagttccctaacagtttggaacaattatcggtccatccagaactaaacccagatcttattcaagttcggaatgttaggaacggcaatgtgctttatgatcctattgtgctctcctcggaaatgctcaatttttcatcgaattctcatgtgtttttgggtagcaaggatgcaatggtggggcaagattcgaatgcagtctctcaggatgcttcattccccaatttgtctcacccaatttcatctaaagcagctggtgacccacaaaactgtgacaattggaaaggccttggtacacagcaaagctgtgattggattgtgaattatgctaatggaacggtggctagtgaaagcaatcaaaaccctatgtatgtcggggaagtcttgtcagccagctctatgaaggtaaacaacatttctgcatcttcactcgatttgaagcctaattacagtggatatcaggatgtgcagtcatcgataaccaatccatccagtgaaatttctagtcaagatagccagaagcattatggtgaaatccatttcaattctcctcaactctaccgaaacacgctccaagaggttgttacttcagctgcagttggaacccaggggctagaaatggcatcctttgcgcatcagaacattagggacactggccgtgattcatgggaagatggtgggaatgaacttgttcttcttccaaactttggaaatcagtctagtgctctccgtcttgattcttctgttgcttggatgactaggccagtagagggttgccatcagtggagtggtggtgatttgggtgttcttgcaaacaagagtcttggagacttgagtaccattgcaagtgattctaacgcacaaggtctgtcactttccctttcatcacatccttcatccaaaatacaggtagctcagtttggggagagatatgagtcgaaggatctacgttctggaactgcagctttcagttgcccacaagatttgaaagttatgagctctggttatttatgttcggattcaaagccacctgttagtggtaaagggtatggaaattcccttcacgacatagtggggacttctacttacactcataggagtgctggccctcttgggccattcactgggtatgcaacaattttaaagagttcaaaatttttgaagccagcacaacaggtcctggatgaattttgtaaagcagcaagtcccaaactggtgaaaacatgtgaggtaactcggaggacatctggagatggtggcaattcagctgtctcgtcctccacattttatgattcaaatgaaattagtgaagggggagttaagagcagctcctgtgaatcgtataggcctgactaccaacaaaagaaggcaaagctcttgtttatgcaggaggaggtttgcagaaggtacaagcaatatcatcaacagatgcaaatggtggtttcatcctttgaaactgtagcaggcctcagtgctgcgaccccctacattgccctggctctgaaaacagtctcgaggcactttcggttcctgaagaatgccatatcagaccagcttaggcacataaggaaagccttgggggaggattttgcaggggatgcaagttcaccaaggttaaactttccgaaacacaaacctggtggggctaacctgggtttccttgaaccccaacaacacgtctggaggccccaacgaggcctaccagaaagggcggtggctattcttagagcttggctgtttgagcatttccttcacccgtatccaacggacacagataaacatatgctagccactcaaaccggtctctctcgaaatcaggtatcaaactggttcataaatgcccgagttcgggtatggaagcccatggttgaagaagtacacatgcttgaaaccaaaggtttagcagaaagggatcaaaattcaggcaaaaaagattggaagtccattggtgaaggtgtcagccaacgggatggcaatcaaccttcaaacaagcctagtgtcaatgcaatgtctgatgagcaattggaatgcagggggatgtgtccctcagcaggcaccggagatgaattgggtgctgagcagtggaatcaagagaagcgatcaagagtggagtgccaaattcctggaagcatggacgggtcattgatgggttttgttccgtaccagcggagcggtgtcgagattgggggacttggagcagtgtcacttacattgggtctcaggcatagtgtggaaactgcacagcaacagcaacatcaacaacaattacaacagcaggaggatcaacttagacggcaatttggaggtcagatgattcatgattttgtgggttga

SEQ ID NO: 241 - protein, 811 aa, Vitis vinifera
MEMRNFRPESHVAQQSRRDKLRVQHQSSTPAHHLEEFPNSLEQLSVHPELNPDLIQVRNVRNGNVLYDPIVLSSEMLNFSSNSHVFLGSKDAMVGQDSNAVSQDASFPNLSHPISSKAAGDPQNCDNWKGLGTQQSCDWIVNYANGTVASESNQNPMYVGEVLSASSMKVNNISASSLDLKPNYSGYQDVQSSITNPSSEISSQDSQKHYGEIHFNSPQLYRNTLQEVVTSAAVGTQGLEMASFAHQNIRDTGRDSWEDGGNELVLLPNFGNQSSALRLDSSVAWMTRPVEGCHQWSGGDLGVLANKSLGDLSTIASDSNAQGLSLSLSSHPSSKIQVAQFGERYESKDLRSGTAAFSCPQDLKVMSSGYLCSDSKPPVSGKGYGNSLHDIVGTSTYTHRSAGPLGPFTGYATILKSSKFLKPAQQVLDEFCKAASPKLVKTCEVTRRTSGDGGNSAVSSSTFYDSNEISEGGVKSSSCESYRPDYQQKKAKLLFMQEEVCRRYKQYHQQMQMVVSSFETVAGLSAATPYIALALKTVSRHFRFLKNAISDQLRHIRKALGEDFAGDASSPRLNFPKHKPGGANLGFLEPQQHVWRPQRGLPERAVAILRAWLFEHFLHPYPTDTDKHMLATQTGLSRNQVSNWFINARVRVWKPMVEEVHMLETKGLAERDQNSGKKDWKSIGEGVSQRDGNQPSNKPSVNAMSDEQLECRGMCPSAGTGDELGAEQWNQEKRSRVECQIPGSMDGSLMGFVPYQRSGVEIGGLGAVSLTLGLRHSVETAQQQQHQQQLQQQEDQLRRQFGGQMIHDFVG

SEQ ID NO: 242 - DNA, 1080 bp, Zea mays
atggtcatggcgaagcagcaccatgacaaggggttgccgaagcaagctcgcaatgagcccgcgccgttccggctcgagcagtgttgccgctgcgacgatgcccaccgtcaggccgacgacgagtccatggatgctgctgggtctgctggcccgctgcacctgactctcggcccgctcggctcggccgccggcccccgctgctcgtgcggtgtcgcgccggcgccggcgccggcgctggcggcgcccgcaacggtggccgtcctccgcgggtcccggtacatgcggccggcgcaggagctgctgggcgaggttgtgcgcgtggccgacctggcggctgccgacgacgaagacgaggaccaggcgacggagcggctcgagggcggcggtcaccgggcagcgcgtcgggcggccgggaaggccgggaacgacggcgacggcgtccaggccaagctcctctacctgctcagcgagctggagagcaggcgggagcgctacttcggcgagctggagcgcgtggtgtcgtcgttcgagccggcgctgggcggcggcgcggcggcggcctacacgaccctgatggcgcgggccatgggccgccacttcggcaacctgcgccgcgccatactgcgcaggctcaggctccaagccgccgccgcggcgaggaggtctctgcggcgcggcggcgaggaccaggacgacgacgacgacgacgacggcgacagcgacggcgaggtgaccgaggagctggtggacaggttggctcggcggacgaagctggccgcggcggcgcgggcggagcaagcgtggcggccgctgcgtggcctgccggatggctccgtggccgtgctccgggcgtggctcttcgaccatttcctccacccgtaccccaacgacggcgagaagctgaggctggcggtgaccaccggcttgagcaggcgccagatatccaactggttcatcaacgcgcgcgtgcggctgtggaagcccatgatcgaggagatgtacaaggacgagttctccgacggttccgccgtctccagctacgacgacgccagcgccagcggcgcctcctcatcctcctga

SEQ ID NO: 243 - protein, 576 aa, Zea mays
MSSAAGGGYGAAGGAEHQHLLLGQASGQLYHVPQHSRREKLRFPPDPADSPPPTAWPAPPPFYSYASSSTSSYSPHSPTLAHTQLVAHALPAGAGAQIPSQNFALSLSSASSNPPPAPRRQLAAGVAAGPYGPFTGYAAVLGRSRFLGPAQKLLEEICDVGGRPPHLDRRSDDEGMLDMDAAGGVDHEMDGGDCATAEAVAVSGAEQQWRKTRLISLMDDVCRRYKQYYQQLQSVISSFETVAGLSNAAPFAFMALRTMSKHFKCLKGMVMSQLRNTSKVIANHGIIAKDDMANFALMGGGAGLLRGNSVNAFSQPHNIWRPQRGLPERAVSVLRSWLFEHFLHPYPTDSDKQMLAKQTGLTRNQVSNWFINARVRLWKPMVEEIHNLEMRQLHKTTSVDQNQLGMQQQNHHSSDGSGRPSSDPSNSQRGQSSGMTRNLSSRAPRHIQDDELSQMPHDMAGQVSFAYSGLPPAHHGLALSHHHHPQQAQAEAVGVGGVAASSGGGVSLTLGLHQNNNNNRAYIAEPLPAALPLSLPHRFGLEDVSDAYVMGPFGGQDRHFSKGIGGGHNLLHDFVG

SEQ ID NO: 244 - DNA, 1731 bp, Zea mays
atgtcctcggcggcgggcggtggatacggggctgcgggcggcgccgagcaccagcacctgttgctggggcaggcctcggggcagctctaccacgtgccgcagcacagccgccgcgagaagctgcggttcccgcccgacccggccgactcgcccccgcccactgcctggccggcgcctccacccttctactcctacgcgtcctcgtcgacgtcgtcctactcgccgcatagcccaacgctggcgcacacgcagctagtggcgcacgcgctacctgccggcgccggggcccaaatcccgagccagaactttgcgctctcgctctcttcggcgtcctcgaaccctccgcccgcgccgcggaggcagctcgccgcgggggtagccgctgggccgtacggcccgttcacgggctacgcggccgtcctcgggcggtccaggttcctgggccccgcgcagaagctactcgaggagatctgcgacgtgggcggacggcccccgcacctggaccggcgctccgacgacgagggtatgctcgacatggacgcggcggggggcgtggaccacgagatggacggcggtgactgcgctaccgctgaggcggtcgccgtctcgggcgccgagcagcagtggaggaagacaaggctcatctccctcatggatgacgtctgcaggcgatacaagcagtactaccagcagctgcaatccgtgatctcctcgttcgagactgttgcagggctgagcaacgcggcccccttcgctttcatggctcttcggacgatgtcgaagcacttcaagtgtctgaaggggatggtgatgagccagctacggaacacgagcaaggtcatcgccaaccatgggattattgccaaggacgatatggcgaacttcgcgctcatgggtggtggagcaggcctcctgaggggaaacagcgtgaacgcgttcagccagcctcacaacatttggaggcctcaaagagggcttcctgagcgtgcagtgtctgttcttcgctcatggctgtttgagcacttcttgcatccgtatccaactgatagtgacaagcagatgctggctaaacagacagggttaacaaggaaccaggtgtccaattggttcatcaacgcaagggtgcgtctctggaagccgatggtggaagagatccacaacctggagatgcggcagctgcacaagaccacatcggtggaccagaatcaactcggcatgcagcagcagaaccaccactcgtcggacggcagcgggaggccttcctccgacccttcgaactcccagcggggccaaagcagcggcatgacaagaaacctcagctctcgggcaccacgccacatccaggacgacgagctctcccagatgccccacgacatggcaggacaggtgagctttgcgtacagtgggctcccccccgcgcaccacggtctcgcgctgtcacaccaccaccacccccagcaagcgcaagctgaggcggttggtgttggcggcgtggccgccagcagcggcggcggcgtttccctcacgcttggccttcaccagaacaacaacaacaacagggcatatatcgccgagcccctcccggccgcgctcccgctcagcctcccgcaccggttcgggctggaggacgtgagcgacgcctacgtgatggggccgttcggcggccaggaccgccatttcagcaaggggatcggtggtgggcacaacttgctccatgactttgtcggttga

SEQ ID NO: 245 - protein, 359 aa, Zea mays
MVMAKQHHDKGLPKQARNEPAPFRLEQCCRCDDAHRQADDESMDAAGSAGPLHLTLGPLGSAAGPRCSCGVAPAPAPALAAPATVAVLRGSRYMRPAQELLGEVVRVADLAAADDEDEDQATERLEGGGHRAARRAAGKAGNDGDGVQAKLLYLLSELESRRERYFGELERVVSSFEPALGGGAAAAYTTLMARAMGRHFGNLRRAILRRLRLQAAAAARRSLRRGGEDQDDDDDDDGDSDGEVTEELVDRLARRTKLAAAARAEQAWRPLRGLPDGSVAVLRAWLFDHFLHPYPNDGEKLRLAVTTGLSRRQISNWFINARVRLWKPMIEEMYKDEFSDGSAVSSYDDASASGASSSS

SEQ ID NO: 246 - DNA, 53 bp, Artificial sequence
  primer 1
ggggacaagtttgtacaaaaaagcaggcttaaacaatggctgaggagggtttt

SEQ ID NO: 247 - DNA, 52 bp, Artificial sequence
  primer 2
ggggaccactttgtacaagaaagctgggtttgcttagttagtggattgaaga

SEQ ID NO: 248 - DNA, 2194 bp, Oryza sativa; identical to SEQ ID NO: 61
